(19) United States
(12) Patent Application Publication
(10) Pub. No.: US 2024/0209078 A1
(43) Pub. Date: Jun. 27, 2024

(54) MULTITARGETING BISPECIFIC ANTIGEN-BINDING MOLECULES OF INCREASED SELECTIVITY

(71) Applicants: AMGEN INC., Thousand Oaks, CA (US); AMGEN RESEARCH (MUNICH) GMBH, Munich (DE)

(72) Inventors: Stephanie Everts, Munich (DE); Matthias Klinger, Munich (DE); Virginie Naegele, Munich (DE); Adam Zalewski, Munich (DE); Claudia Blümel, Munich (DE); Thomas Boehm, Munich (DE); Johannes Brozy, Munich (DE); Igor D'Angelo, Thousand Oaks, CA (US); Peter Kufer, Munich (DE); Petra Lutterbüse, Munich (DE); Markus Muenz, Munich (DE); Doris Rau, Munich (DE); Tobias Raum, Munich (DE); Benno Rattel, Munich (DE); Oliver Thomas, Munich (DE); Ines Ullrich, Munich (DE); Joachim Wahl, Munich (DE); Christian Webhofer, Munich (DE); Sascha Weidler, Munich (DE); Elizabeth Dang Pham, Thousand Oaks, CA (US); Julie Bailis, Thousand Oaks, CA (US)

(21) Appl. No.: 18/251,196

(22) PCT Filed: Nov. 8, 2021
(86) PCT No.: PCT/EP2021/080956

§ 371 Date: Apr. 28, 2023

Related U.S. Application Data
(60) Provisional application No. 63/231,877, filed on Aug. 11, 2021.
(60) Provisional application No. 63/110,957, filed on Nov. 6, 2020.

(51) Int. Cl. C07K 16/28; A61P 35/00; A61K 39/00

(52) U.S. Cl. CPC C07K 16/28; A61P 35/00; A61K 2039/505; C07K 2317/31; C07K 2317/524; C07K 2317/526; C07K 2317/53; C07K 2317/565; C07K 2317/92

(57) ABSTRACT

The present invention provides multitargeting bispecific antigen-binding molecules characterized by comprising a first and a second bispecific entity each comprising a domain binding to target, a second domain binding to an extracellular epitope of the human and the Macaca CD3ε chain, wherein both bispecific entities are linked to each other by a spacer which spaces apart the first and the second bispecific entity. Moreover, the invention provides a polynucleotide, encoding the multitargeting bispecific antigen-binding molecule, a vector comprising this polynucleotide, host cells, expressing the construct and a pharmaceutical composition comprising the same.

### TECHNICAL FIELD

[0001] This invention relates to products and methods of biotechnology, in particular to multitargeting antigen-binding molecules, their preparation and their use.

### BACKGROUND

[0002] The redirection of T cell activity against tumor cells by means of bispecific molecules independent of T cell receptor specificity is an evolving approach in immunooncology (Frankel S R, Baeuerle P A. Targeting T cells to tumor cells using bispecific antibodies. Curr Opin Chem Biol 2013; 17:385-92). Such new protein-based pharmaceuticals typically can simultaneously bind to two different types of antigen. They are known in several structural formats, and current applications have been explored for cancer immunotherapy and drug delivery (Fan, Gaowei; Wang, Zujian; Hao, Mingju; Li, Jinming (2015). “Bispecific antibodies and their applications”. Journal of Hematology & Oncology. 8: 130).

[0003] Bispecific molecules useful in immunooncology can be antigen-binding polypeptides such as antibodies, e.g. IgG-like, i.e. full-length bispecific antibodies, or non-IgG-like bispecific antibodies, which are not full-length antigen-binding molecules. Full length bispecific antibodies typically retain the traditional monoclonal antibody (mAb) structure of two Fab arms and one Fc region, except the two Fab sites bind different antigens. Non-full-length bispecific antibodies can lack an Fc region entirely. These include chemically linked Fabs, consisting of only the Fab regions, and various types of bivalent and trivalent single-chain variable fragments (scFvs). There are also fusion proteins mimicking the variable domains of two antibodies. An example of such a format is the bi-specific T-cell engager (BiTE®) (Yang, Fa; Wen, Weihong; Qin, Weijun (2016). “Bispecific Antibodies as a Development Platform for New Concepts and Treatment Strategies”. International Journal of Molecular Sciences. 18 (1): 48).

[0004] Exemplary bispecific antibody-derived molecules such as BiTE® molecules are recombinant protein constructs made from two flexibly linked antibody derived binding domains. One binding domain of BiTE® antigen-binding molecules is specific for a selected tumor-associated surface antigen on target cells; the second binding domain is specific for CD3, a subunit of the T cell receptor complex on T cells. By their particular design, BiTE® antigen-binding molecules are uniquely suited to transiently connect T cells with target cells and, at the same time, potently activate the inherent cytolytic potential of T cells against target cells. An important further development of the first generation of BiTE® antigen-binding molecules (see WO 99/54440 and WO 2005/040220) developed into the clinic as AMG 103 and AMG 110 was the provision of bispecific antigen-binding molecules binding to a context independent epitope at the N-terminus of the CD3ε chain (WO 2008/119567). BiTE® antigen-binding molecules binding to this elected epitope do not only show cross-species specificity for the human and the Macaca, or Callithrix jacchus, Saguinus oedipus or Saimiri sciureus CD3ε chain, but also, due to recognizing this specific epitope (instead of previously described epitopes of CD3 binders in bispecific T cell engaging molecules), do not demonstrate unspecific activation of T cells to the same degree as observed for the previous generation of T cell engaging antibodies. This reduction in T cell activation was connected with less or reduced T cell redistribution in patients, the latter being identified as a risk for side effects, e.g. in pasotuximab.

[0005] Antibody-based molecules as described in WO 2008/119567 are characterized by rapid clearance from the body; thus, while they are able to reach most parts of the body rapidly, their in vivo applications may be limited by their brief persistence in vivo. On the other hand, their concentration in the body can be adapted and fine-tuned at short notice. Prolonged administration by continuous intravenous infusion is used to achieve therapeutic effects because of the short in vivo half-life of this small, single chain molecule. However, bispecific antigen-binding molecules are available which have more favorable pharmacokinetic properties, including a longer half-life as described in WO 2017/134140. An increased half-life is typically useful in in vivo applications of immunoglobulins, especially with respect to antibody fragments or constructs of small size, e.g. in the interest of patient compliance.

[0006] One challenging ongoing problem in antibody-based immunooncology is tumor escape. Such tumor escape happens when the immune system—even if triggered or directed by some antibody-based immune-therapeutics—is not capable enough to eradicate tumors, which carry accumulated genetic and epigenetic alterations and use several mechanisms to be the victorious of the immunoediting process (Keshavarz-Fathi, Mahsa; Rezaei, Nima (2019) “Vaccines for Cancer Immunotherapy”). Generally, four mechanisms interfering with effective antitumor immune responses are known: (1) defective tumor antigen processing or presentation, (2) lack of activating mechanisms, (3) inhibitory mechanisms and immunosuppressive state, and (4) resistant tumor cells. Especially with respect to the first mechanism, tumor antigens might be present in a new form due to the genetic instability, mutation of the tumor and escape from immune system. Epitope-negative tumor cells remain hidden and consequently resistant to the immune rejection. They have been developed following the elimination of epitope-positive tumor cells, similar to Darwin's theory of natural selection. In consequence, antibody-based immune-therapy directed against an antigen on tumor cells is rendered ineffective when such tumor cells no longer express a respective antigen due to tumor escape. Said antigen loss is understood herein as driving force for tumor escape and thus, used interchangeably. Accordingly, there is a need to provide improved antibody-based immunooncology which addresses the problem of antigen loss to effectively prevent tumor escape.

[0007] A probably even more pressing challenge to the broad utilization of immunooncology with respect to T-cell engaging bispecific molecules is the availability of suitable targets (Bacac et al., Clin Cancer Res; 22(13) Jul. 1, 2016). For example, solid tumor targets may be overexpressed on tumor cells but expressed at lower, yet significant levels on nonmalignant primary cells in critical tissues. In nature, according to Bacac et al, T cells can distinguish between high- and low-antigen expressing cells by means of relatively low-affinity T cell receptors (TCRs) that can still achieve high-avidity binding to target cells expressing sufficiently high levels of target antigen. T-cell engaging bispecific molecules that could facilitate the same, and thus maximize the window between killing of high- and low-target expressing cells, are thus highly desirable. One approach discussed in the art is the use of dual targeting of two antigens which may lead to improved target selectivity over normal tissues that express only one or low levels of both target antigens. This effect is thought to be dependent on the avidity component mediated by the concurrent binding of the bsAb to both antigens on the same cell. With respect to dual targeting as such, some multispecific monoclonal antibodies (mAb) or other immune constructs are known in the art. WO 2014/116846 teaches a multispecific binding protein comprising a first binding site that specifically binds to a target cell antigen, a second binding site that specifically binds to a cell surface receptor on an immune cell, and a third binding site that specifically binds to cell surface modulator on the immune cell. US 2017/0022274 discloses a trivalent T-cell redirecting complex comprising a bispecific antibody, wherein the bispecific antibody has two binding sites against a tumor-associated antigen (TAA) and one binding site against a T-cell.

[0008] However, dual targeting alone as in molecules described above may not be sufficient for efficient target selectivity (Mazor et al, mAbs 7:3, 461-469; May/June 2015). Especially the configuration of the bsAb binding domains, namely monovalent vs. bivalent, is a critical factor. Even more, the provision of a bispecific molecule with several valences alone may not lead to clinically suitable therapeutic as also the potential risk profile in terms of significant immunological side effects such as cytokine release syndrome (CRS) has to be considered. Hence, despite the so-far achieved preclinical and clinical success of antibody-based immune-therapeutics, notable limitations remain including differential responses between individuals and cancer types. Not all patients will respond to therapy at available safe doses as dose-limiting toxicity can be a limiting factor for the efficacy of antibody-based immune-therapeutics. Hence, there is also a need to reduce dose-limiting toxicity in antibody-based immune-therapeutics to make such therapy available to more patients suffering from diverse proliferative diseases.

[0009] While different multispecific antibodies or antibody fragments are known in the art, some of which address T-cells, no multitargeting bispecific molecules have been proposed before which both addresses the need of overcoming dose-limiting toxicity in T cell redirecting immune-therapeutics by increasing the therapeutic window and are a stable and ready-to-use therapeutic system.

### SUMMARY

[0010] In view of the various unmet needs described above, it is an object of the present invention to provide a molecule which comprises at least one polypeptide chain which molecule is preferably an antigen-binding molecule. The molecule of the present invention is further preferably bispecific, such as a T cell engaging molecule. Further, the molecule of the present invention is preferably multitargeting, e.g. it is typically capable to immune-specifically bind to at least two antigens on a target cell which are typically associated with one or more diseases. It is further preferred that a molecule of the present invention is typically capable to immuno-specifically bind to two antigens on an effector cell at the same time, preferably for use in the treatment of said one or more diseases. Accordingly, the present invention provides a preferably multitargeting bispecific antigen-binding molecule comprising at least one polypeptide, wherein the molecule is characterized by comprising at least five distinctive structural entities, i.e. (i.) a first domain binding to a target cell surface antigen (e.g. a first tumor associated antigen, TAA), (ii.) a second domain binding to an extracellular epitope of the human (and preferably non-human primate, e.g. Macaca) CD3ε chain, wherein the first binding domain and the second binding domain together form a first bispecific entity, (iii.) a spacer which connects but also sufficiently spaces apart the first bispecific entity from a second bispecific entity comprising (iv.) a third domain binding to the same or preferably a different target cell surface antigen (e.g. a second TAA), and (v.) a fourth domain binding to an extracellular epitope of the human (and preferably non-human primate, e.g. Macaca) CD3ε chain. Preferably, the domains are comprised of VH and VL domains in amino to carboxyl orientation, respectively, wherein a flexible but short peptide linker links the VL of the first domain to the VH of the second domain and the VL of the third domain to the VH of the fourth domain, respectively. Surprisingly, a multitargeting bispecific antigen-binding molecule as described herein is typically capable to enable T-cells to distinguish between killing of cells expressing only one or both targets typically associated with a particular disease, thus opening a therapeutic window and reducing the risk for off-target toxicities and side effects. Moreover, the invention provides a polynucleotide encoding the multitargeting bispecific antigen-binding molecule, a vector comprising this polynucleotide, and host cells expressing the construct and a pharmaceutical composition comprising the same.

[0011] In a first aspect, it is envisaged in the context of the present invention to provide a molecule comprising at least one polypeptide chain, wherein the molecule comprises
[0012] (i.) a first binding domain, preferably comprising a paratope, which specifically binds to a first target cell surface antigen (e.g. TAA1),
[0013] (ii.) a second binding domain, preferably comprising a paratope, which specifically binds to an extracellular epitope of the human and/or the Macaca CD3ε chain,
[0014] (iii.) a third binding domain, preferably comprising a paratope, which specifically binds to a second target cell surface antigen (e.g. TAA2), and
[0015] (iv.) a fourth binding domain, preferably comprising a paratope, which specifically binds to an extracellular epitope of the human and/or the Macaca CD3ε chain,
[0016] wherein the first binding domain and the second binding domain form a first bispecific entity and the third and the fourth binding domain form a second bispecific entity, and
[0017] wherein the molecule comprises a spacer entity having a molecular weight of at least about 5 kDa and/or having a length of more than 50 amino acids, wherein the spacer entity spaces apart the first and the second bispecific entity by at least a distance of about 50 Å, wherein the indicated distance is understood as the distance between centers of mass of the first and the second bispecific entity, and which spacer entity is positioned between the first and the second bispecific entity.

[0018] Within said aspect, it is also envisaged in the context of the present invention to provide a molecule which is an antigen-binding molecule, preferably a bispecific antigen-binding molecule, more preferably a multitargeting bispecific antigen-binding molecule.

[0019] Within said aspect, it is also envisaged in the context of the present invention to provide an antigen-binding molecule, wherein the arrangement of domains in an amino to carboxyl order is selected from the group consisting of
[0020] (i.) first and second domain, spacer, third and fourth domain
[0021] (ii.) first and second domain, spacer, fourth and third domain
[0022] (iii.) second and the first domain, spacer, third and fourth domain, and
[0023] (iv.) second and first domain, spacer, fourth and third domain.

[0024] Within said aspect, it is also envisaged in the context of the present invention to provide an antigen-binding molecule, wherein said spacer entity has a molecular at least 10 kDa, more preferably at least 15 kDa, 20 kDa or even 50 kDa, and/or wherein said spacer entity comprises an amino acid sequence which comprises more than 50 amino acids, preferably at least 100 amino acids, more preferably at least 250 amino acids, and even more preferably at least 500 amino acids.

[0025] Within said aspect, it is also envisaged in the context of the present invention to provide an antigen-binding molecule, wherein said spacer entity is a rigid molecule which preferably folds into a secondary structure, preferably a helical structure, and/or a ternary structure, preferably a protein domain structure, most preferably a globular protein and/or parts thereof and/or combinations of globular proteins and/or parts thereof.

[0026] Within said aspect, it is also envisaged in the context of the present invention to provide an antigen-binding molecule, wherein the spacer entity is a globular protein, wherein the distance between the C alpha atoms of the first amino acid located at the N-terminus and the last amino acid at the C-terminus are spaced apart by at least 20 Å, preferably at least 30 Å, more preferably at least 50 Å, in order to effectively space apart the first and the second bispecific entity by preferably at least 50 Å.

[0027] Within said aspect, it is also envisaged in the context of the present invention to provide an antigen-binding molecule, wherein said spacer entity which effectively spaces apart the first and the second bispecific entity is selected from a group consisting of ubiquitin, beta 2 microglobulin, SAND domain, Green fluorescent protein (GFP), VHH antibody lama domain, PSI domain from Met-receptor, Fibronectin type III domain from tenascin, Granulocyte-macrophage colony-stimulating factor (GM-CSF), interleukin-4, CD137L Ectodomain, Interleukin-2, PD-1 binding domain from human Programmed cell death 1 ligand 1 (PDL1), Tim-3 (AS 24-130), MiniSOG, a programmed cell death protein 1 (PD1) domain, human serum albumin (HSA) or a derivate of any of the foregoing spacer entities, a multimer of a rigid linker, and a Fc domain or dimer or trimer thereof, each Fc domain comprising two polypeptide monomers comprising each a hinge, a CH2 and a CH3 domain a hinge and a further CH2 and a CH3 domain, wherein said two polypeptide monomers are fused to each other via a peptide linker or wherein the two polypeptide monomers are linked together by non-covalent CH3-CDH3 interactions and/or covalent disulfide bonds to form a heterodimer.

[0028] Within said aspect, it is also envisaged in the context of the present invention to provide an antigen-binding molecule, wherein said spacer entity is at least one Fc domain, preferably one domain or two or three covalently linked domains, which or each of which comprises in an amino to carboxyl order:
[0029] hinge-CH2-CH3-linker-hinge-CH2-CH3.

[0030] Within said aspect, it is also envisaged in the context of the present invention to provide an antigen-binding molecule, wherein each of said polypeptide monomers in the spacer entity has an amino acid sequence that is at least 90% identical to a sequence selected from the group consisting of: SEQ ID NO: 17-24, wherein preferably each of said polypeptide monomers has an amino acid sequence selected from SEQ ID NO: 17-24.

[0031] Within said aspect, it is also envisaged in the context of the present invention to provide an antigen-binding molecule, wherein the CH2 domain in the spacer comprises an intra domain cysteine disulfide bridge.

[0032] Within said aspect, it is also envisaged in the context of the present invention to provide an antigen-binding molecule, wherein the molecule is a single polypeptide chain.

[0033] Within said aspect, it is also envisaged in the context of the present invention to provide an antigen-binding molecule, wherein the spacer entity comprises an amino acid sequence selected the group consisting of SEQ ID NO: 13 and 15 to 16 and 25 to 34, ubiquitin (SEQ ID NO: 1081), beta 2 microglobulin (SEQ ID NO: 1083), SAND domain (SEQ ID NO: 1084), Green fluorescent protein (GFP) (SEQ ID NO: 1085), VHH antibody lama domain (SEQ ID NO: 1086), PSI domain from Met-receptor (SEQ ID NO: 1087), Fibronectin type III domain from tenascin (SEQ ID NO: 1088), Granulocyte-macrophage colony-stimulating factor (GM-CSF) (SEQ ID NO: 1089), interleukin-4 (SEQ ID NO: 1090), CD137L Ectodomain (SEQ ID NO: 1091), Interleukin-2 (SEQ ID NO: 1092), PD-1 binding domain from human Programmed cell death 1 ligand 1 (PDL1) (SEQ ID NO: 1093), Tim-3 (AS 24-130) (SEQ ID NO: 1094), MiniSOG (SEQ ID NO: 1095), a programmed cell death protein 1 (PD1) domain (SEQ ID NO: 16), human serum albumin (has, SEQ ID NO: 15) or an amino acid with at least 90%, preferably 95% or even 98% sequence identity thereof, preferably scFc (SEQ ID NO: 25).

[0034] Within said aspect, it is also envisaged in the context of the present invention to provide an antigen-binding molecule, wherein the molecule comprises two polypeptide chains.

[0035] Within said aspect, it is also envisaged in the context of the present invention to provide an antigen-binding molecule comprising two polypeptide chains, wherein
[0036] (i.) the first polypeptide chain comprises the first domain, the second domain, and the first polypeptide monomer preferably comprising hinge, a CH2 and a CH3 domain, and
[0037] (ii.) wherein the second polypeptide chain comprises the third domain, the fourth domain, and the second polypeptide monomer preferably comprising hinge, a CH2 and a CH3 domain,
[0038] wherein the two polypeptide monomers form a heterodimer pairing the CH2 and the CH3 domains of the two peptide monomers, respectively, wherein the CH2 domain of the first peptide monomer is linked to the first or second domain of the first bispecific entity in C-terminal position of said entity, and wherein the CH3 domain of the second peptide monomer is linked to the third or fourth domain of the second bispecific entity in N-terminal position of said entity, i.e. the N-terminus of the second polypeptide chain is at the CH2 domain of the second polypeptide monomer and the C-terminus is at the third or fourth domain,
[0039] wherein preferably the first and second polypeptide monomer form a heterodimer, thereby connecting the first and the second polypeptide chain.

[0040] Within said aspect it is also envisaged that the first peptide monomer of the first peptide chain is SEQ ID NO 35 and the second peptide monomer of the second peptide chain is SEQ ID NO 36, wherein the two peptide monomers preferably form a heterodimer.

[0041] Within said aspect it is also envisaged that the antigen-binding molecule is characterized by
[0042] (i) the first and third domain comprise two antibody-derived variable domains and the second and the fourth domain comprises two antibody-derived variable domains;
[0043] (ii) the first and third domain comprise one antibody-derived variable domain and the second and the fourth domain comprises two antibody-derived variable domains;
[0044] (iii) the first and third domain comprise two antibody-derived variable domains and the second and the fourth domain comprises one antibody-derived variable domain; or
[0045] (iv) the first domain comprises one antibody-derived variable domain and the third domain comprises one antibody-derived variable domain.

[0046] Within said aspect, it is also envisaged in the context of the present invention to provide an antigen-binding molecule comprising two polypeptide chains, wherein
[0047] the first polypeptide chain comprises a VH of the first domain, a VH second domain, the first polypeptide monomer comprising preferably a hinge, a CH2 and a CH3 domain, a VH of the third domain, and a VH of the fourth domain; and
[0048] the second polypeptide chain comprises a VL of the first domain, a VL second domain, the first polypeptide monomer comprising preferably a hinge, a CH2 and a CH3 domain, a VL of the third domain, and a VL of the fourth domain,
[0049] wherein preferably the first and second polypeptide monomer form a heterodimer, thereby connecting the first and the second polypeptide chain.

[0050] Within said aspect, it is also envisaged in the context of the present invention to provide an antigen-binding molecule, wherein the first, second, third and fourth binding domain each comprise in an amino to carboxyl order a VH domain and a VL domain, wherein the VH and VL within each domain is connected by a peptide linker, preferably a flexible linker which comprises serine, glutamine and/or glycine as amino acid building blocks, preferably only serine (Ser, S) or glutamine (Gln, Q) and glycine (Gly, G), more preferably (G4S)n or (G4Q)n, even more preferably SEQ ID NO: 1 or 3.

[0051] Within said aspect, it is also envisaged in the context of the present invention to provide peptide linker, wherein the peptide linker comprises or consists of S(G4X)n and (G4X)n, wherein X is selected from the group consisting of Q, T, N, C, G, A, V, I, L, and M, and wherein n is an integer selected from integers 1 to 20, preferably wherein n is 1, 2, 3, 4, 5 or 6, preferably wherein X is Q, wherein preferably the peptide linker is (G4X)n, n is 3, and X is Q.

[0052] Within said aspect, it is also envisaged in the context of the present invention to provide an antigen-binding molecule, wherein the peptide linker between the first binding domain and the second binding domain and the third binding domain and the fourth binding domain is preferably a flexible linker which comprises serine, glutamine and/or glycine or glutamic acid, alanine and lysine as amino acid building blocks, preferably selected from the group consisting of SEQ ID NO: 1 to 4, 6 to 12 and 1125.

[0053] Within said aspect, it is also envisaged in the context of the present invention to provide an antigen-binding molecule, wherein the peptide linker between the first binding domain or the second binding domain and the spacer, and/or the third binding domain and the fourth binding domain and the spacer, respectively, is preferably a short linker rich in small and/or hydrophilic amino acids, preferably glycine and preferably SEQ ID NO: 5.

[0054] Within said aspect, it is also envisaged in the context of the present invention to provide an antigen-binding molecule, wherein any of the first target cell surface antigen and the second target cell surface antigen is selected from the group consisting of CS1, BCMA, CDH3, FLT3, CD123, CD20, CD22, EpCAM, MSLN and CLL1.

[0055] Within said aspect, it is also envisaged in the context of the present invention to provide an antigen-binding molecule, wherein the first target cell surface antigen and the second target cell surface antigen are not identical.

[0056] Within said aspect, it is also envisaged in the context of the present invention to provide an antigen-binding molecule, wherein the first target cell surface antigen and the second target cell surface antigen are identical.

[0057] Within said aspect, it is also envisaged in the context of the present invention to provide an antigen-binding molecule, wherein the first binding domains is capable of binding to the first target cell surface antigen and the third binding domain is capable of binding to the second target cell surface antigen simultaneously, preferably wherein the first target cell surface antigen and the second target cell surface antigen are on the same target cell.

[0058] Within said aspect, it is also envisaged in the context of the present invention to provide an antigen-binding molecule of claim 1, wherein the first target cell surface antigen and the second target cell surface antigen, respectively, are selected from the group consisting of CS1 and BCMA, BCMA and CS1, FLT3 and CD123, CD123 and FLT3, CD20 and CD22, CD22 and CD20, EpCAM and MSLN, MSLN and EpCAM, MSLN and CDH3, CDH3 and MSLN, FLT3 and CLL1, and CLL1 and FLT3.

[0059] Within said aspect, it is also envisaged in the context of the present invention to provide an antigen-binding molecule of claim 1, wherein the first target cell surface antigen and/or the second target cell surface antigen is human MSLN (selected from SEQ ID NOs: 1181, 1182 and 1183), and wherein the first and/or third binding domain of the antigen-binding molecule of the invention binds to human MSLN epitope cluster E1 (SEQ ID NO: 1175, aa 296-346 position according to Kabat) as determined by murine chimere sequence analysis as described herein, but preferably not to human MSLN epitope cluster E2 (SEQ ID NO: 1176, aa 247-384 position according to Kabat), E3 (SEQ ID NO: 1177, aa 385-453 position according to Kabat), E4 (SEQ ID NO: 1178, aa 454-501 position according to Kabat) and/or E5 (SEQ ID NO: 1179 aa 502-545 position according to Kabat).

[0060] Within said aspect, it is also envisaged in the context of the present invention to provide an antigen-binding molecule of claim 1, wherein the first target cell surface antigen and/or the second target cell surface antigen is human CDH3 (SEQ ID NOs: 1170), and wherein the first and/or third binding domain of the antigen-binding molecule of claim 1 binds to human CDH3 epitope cluster D2B (SEQ ID NO: 1171, aa 253-290 position according to Kabat), D2C (SEQ ID NO: 1172 aa 291-327 position according to Kabat), D3A (SEQ ID NO: 1173 aa 328-363 position according to Kabat) and D4B (SEQ ID NO: 1174, aa 476-511 position according to Kabat), preferably D4B (SEQ ID NO: 1174, aa 476-511 position according to Kabat), as determined by murine chimere sequence analysis as described herein.

[0061] Within said aspect, it is also envisaged in the context of the present invention to provide an antigen-binding molecule, wherein the second and the fourth binding domain (CD3 binding domains) both have (i.) an affinity lower than characterized by a KD value of about 1.2×10-8 M measured by surface plasmon resonance (SPR), or (ii.) an affinity characterized by a KD value of about 1.2×10-8 M measured by SPR.

[0062] Within said aspect, it is also envisaged in the context of the present invention to provide an antigen-binding molecule, wherein the second and the fourth binding domain (CD3 binding domains) have an affinity characterized by a KD value of about 1.0×10-7 to 5.0×10-6 M measured by SPR, preferably about 1.0 to 3.0×10-6 M, more preferably about 2.5×10-6 M measured by SPR.

[0063] Within said aspect, it is also envisaged in the context of the present invention to provide an antigen-binding molecule, wherein the second and the fourth binding domain (CD3 binding domains) have an affinity characterized by a KD value of about 1.0×10-7 to 5.0×10-6 M measured by SPR, preferably about 1.0 to 3.0×10-6 M, more preferably about 2.5×10-6 M measured by SPR.

[0064] Within said aspect, it is also envisaged in the context of the present invention to provide an antigen-binding molecule, wherein each of the second and the fourth binding domain (CD3 binding domains) individually has an at least about 10-fold, preferably at least about 50-fold or more preferably at least about 100-fold lower activity than one CD3 binding domain comprising a VH according to SEQ ID NO 43 and a VL according to SEQ ID NO 44 (i.e. in a mono targeting context in contrast to a dual targeting context).

[0065] Within said aspect, it is also envisaged in the context of the present invention to provide an antigen-binding molecule, wherein the second and the fourth domain are effector binding domains binding to CD3ε chain which comprise or consist of a VH region linked to a VL region, wherein
[0066] i) the VH region comprises:
   [0067] a CDR-H1 sequence of X1YAX2N, where X1 is K, V, S, G, R, T, or I; and X2 is M or I;
   [0068] a CDR-H2 sequence of RIRSKYNNYATYYADX1VKX2, where X1 is S or Q; and X2 is D, G, K, S, or E; and
   [0069] a CDR-H3 sequence of HX1NFGNSYX2SX3X4AY, where X1 is G, R, or A; X2 is I, L, V, or T; X3 is Y, W or F; and X4 is W, F or Y; and
[0070] ii) wherein the VL region comprises:
   [0071] a CDR-L1 sequence of X1SSTGAVTX2X3X4YX5N, where X1 is G, R, or A; X2 is S or T; X3 is G or S; X4 is N or Y; and X5 is P or A;
   [0072] a CDR-L2 sequence of X1TX2X3X4X5X6; where X1 is G or A; X2 is K, D, or N; X3 is F, M or K; X4 is L or R; X5 is A, P, or V; and X6 is P or S; and
   [0073] a CDR-L3 sequence of X1LWYSNX2WV, where X1 is V, A, or T; and X2 is R or L; and
[0074] iii) wherein one or more of CDR sequences of the VH region of i) and/or of the VL region of ii) comprise one amino acid substitution or a combination thereof selected from X24V and X24F in CDR-H1;
   [0075] D15, and X116A in CDR-H2;
   [0076] H1, X12E, F4, and N6 in CDR-H3; and
   [0077] X11L and W3 in CDR-L3.

[0078] Within said aspect, it is also envisaged in the context of the present invention to provide an antigen-binding molecule, wherein the second and the fourth binding domain comprise a VH region comprising CDR-H 1, CDR-H2 and CDR-H3 selected from SEQ ID NOs 37 to 39, 45 to 47, 53 to 55, 61 to 63, 69 to 71, 436 to 438, 1126 to 1128, 1136 to 1138, 1142 to 1144, and 1148 to 1150, and a VL region comprising CDR-L1, CDR-L2 and CDR-L3 selected from SEQ ID NOs 40 to 42, 48 to 50, 56 to 58, 64 to 66, 72 to 74, 439 to 441, 1129 to 1131, 1139 to 1141, 1145 to 1147, and 1151 to 1153, preferably 61 to 63 and 64 to 66.

[0079] Within said aspect, it is also envisaged in the context of the present invention to provide an antigen-binding molecule, wherein the second and fourth binding domain comprise a VH region selected from SEQ ID NOs 43, 51, 59, 67, 75, 442 and 1132, preferably 67.

[0080] Within said aspect, it is also envisaged in the context of the present invention to provide an antigen-binding molecule, wherein the second and fourth binding domain comprise a VL region selected from SEQ ID NOs 44, 52, 60, 68, 76, 443 and 1133, preferably 68.

[0081] Within said aspect, it is also envisaged in the context of the present invention to provide an antigen-binding molecule, wherein the second and fourth binding domain comprising a VH region selected from SEQ ID NOs 43, 51, 59, 67, 75, 442 and 1132, preferably 67, and a VL region selected from SEQ ID NOs 44, 52, 60, 68, 76, 443 and 1133, preferably 68, wherein when the VH region is 1132 and the VL region is 1133, the second and/or fourth binding domain as scFab domain additionally comprises a CH1 domain of SEQ ID NO: 1134 and a CLK domain of SEQ ID NO: 1135, and wherein the VH and VL region are linked to each other by a linker preferably selected from SEQ ID NO 1, 3 and 1125.

[0082] Within said aspect, it is also envisaged in the context of the present invention to provide an antigen-binding molecule, wherein the first and/or the third (target) binding domain bind to CDH3 and comprise a VH region comprising SEQ ID NO: 1154 as CDR-H 1 wherein X1 (the number behind the “X” indicates the numerical order of the “X” in respective amino acid sequence in N- to C-orientation in the sequence table) is S or N, X2 is Y or S, X3 is P or W, X4 is I or M and X5 is Y, N or H; SEQ ID NO: 1155 as CDR-H2 wherein X1 is K, V, N or R; X2 is A, D, R, Y, S, W or H; X3 is Y, S, P, G or T; X4 is S, G or K; X5 is A, V, D, K, G, or T; X6 is A, V, D, K, S, G or H; X7
[0083] is Y, G, or E; X8 is K, I, or N; X9 is A, S, or N; X10 is S, Q or G; X11
[0084] is S or K; X12 is F or V; and X13 is K or Q; and SEQ ID NO: 1156 as CDR-H3, wherein X1 is F or Q; X2 is R,K,S or W; X3 is G or D; X4 is Y, P or R; X5 is R, S, G, N or T; X6
[0085] is Y,A or H; X7 is F, L or M; X8 is A or V; and X9 is Y or V; and wherein the first and/or the third (target) binding domain bind to CDH3 and comprise a VL region comprising SEQ ID NO: 1158 as CDR-L 1 wherein X1 is K or R, X2 is A or S; X3 is Q,D,S,G or E; X4 is S,D or N; X5 is V,L or I; X6 is, K,Y,S, or H; X7 is S or N; X8 is F,L or M; and X9 is A,N or H; SEQ ID NO: 1159 as CDR-L 2 wherein X1 is Y,G,W,N; X2 is T or A; X3 is S or K; X4 is T,N or R; X5 is L or R; X6 is E,A,V or H; and X7 is S or E; and SEQ ID NO: 1160 as CDR-L3 wherein X1 is Q or V; X2 is Q,N or H; X3 is F,L,Y,W,N, or H; X4 is A,D,Y,S or N; X5 is Q,R,S,G,W or M; X6 is T,Y or F; and X7 is F,Y or L.

[0086] Within said aspect, it is also envisaged in the context of the present invention to provide an antigen-binding molecule, wherein the first and/or the third (target) binding domain bind to MSLN and comprise a VH region comprising SEQ ID NO: 1162 as CDR-H 1 wherein X1 (the number behind the “X” indicates the numerical order of the “X” in respective amino acid sequence in N- to C-orientation in the sequence table) is S,G or D; X2 is Y,A,G or F; X3 is I,W, or M; and X4 is V,S,G,T, or H; SEQ ID NO: 1163 as CDR-H 2 wherein X1 is A,S,N,W,Y, or V; X2 is Y,S or N; X3 is Y,G,P, or S; X4 is D,H,S, or N; X5 is G or S; X6 is E,G or S; X7 is G,S,N,F,T or Q; X8
[0087] is S,W,K,D,I or T; X9 is Y or N; X10 is A or N; X11 is A,P,N,D,E,I or Q; X12 is D,A,S or K; X13 is V,L, or F; X14 is K or Q; and X15 is G or S; and SEQ ID NO: 1164 as CDR-H 3 wherein X1 is D,E or V; X2 is R,G, or E; X3 is Y,A, or N; X4 is S,Y,V, or H; X5 is A,P,F,Y, or H; X6 is R or S; X7 is E or G; X8 is Y or L; X9 is R,Y or L; X10
[0088] is Y or G; X11 is D or Y; X12 is R,Y, or F; X13 is M,S,F,D or Y; X14 is A,G,S, or T; X15 is L, M, or F; and X16 is Y,I or V; and wherein the first and/or the third (target) binding domain bind to MSLN and comprise a VL region comprising SEQ ID NO: 1166 as CDR-L 1 wherein X1
[0089] is A or S; X2 is G or S; X3 is E or Q; X4 is G,S or K; X5 is I,L,V or F; X6 is R,G or S; X7 is D,S,N or T; X8 is A,S,K or T; X9 is Y or W; X10 is V or L; and X11 is Y or A; SEQ ID NO 1167 as CDR-L2 wherein X1 is A,G or Q; X2 is A or S; X3 is S or T; X4
[0090] is G,S,K,I or T; X5 is R or L; X6 is A,P or Q; and X7 is S or T; and SEQ ID NO 1168 as CDR-L 3 wherein X1 is A or Q; X2 is Y,S,A, or T; X3 is G,E,Y,H or Q; X4 is A or S; X5
[0091] is S,T or F; X6 is -,P or T; X7 is R,A,L or F; and X8 is V or T.

[0092] Within said aspect, it is also envisaged in the context of the present invention to provide an antigen-binding molecule, wherein the first and/or the third (target) binding domain bind to CDH3 and comprise a VH region of SEQ ID NO: 1157 wherein (the number behind the “X” indicates the numerical order of the “X” in respective amino acid sequence in N- to C-orientation in the sequence table) X1 is Q or E; X2 is V,L; X3 is Q,E; X4 is A or G; X5 is G or E; X6 is V or L; X7 is K or V X8 is K or Q, X9 is A or G, X10 is V or L, X11 is K or R, X12 is V or L, X13 is A or K, X14 Y or F, X15 is T or S, X16 is T or S, X17 is S or N, X18 is Y or S, X19 is P or W, X20 is is I or M, X21 is Y,N or H, X22 is Tor A, X23 is Q or K, X24 is V or M, X25 is S or G, X26 is K, V,N or R, X27 is A,D,R, Y,S, W or H, X28 is Y,S,P,Gr or T, X29 is S,K, or G, X30 is A,V,D,K, or, T, X31 is A,-,D,K,S,G, or H, X32 is Y,G, or E, X33 is K,I, or N, X34 is A,S, or N, X35 is S,Q, or G, X36 is Sor K, X37 is F or V, X38 is Q or K, X39 is F or V, X40 is I or M, X41 is T or S, X42 is V,I or R, X43 is T,K or N, X44 is T,A,S or K, X45 is S or N, X46 is A, V or L, X47 is L or M, X48 is Q or E, X49 is
[0093] L or M, X50 is S or N, X51 is S or R, X52 is T or R, X53 is A or S, X54 is G,D, or E, X55 is T or S, X56 is T,K, or R, X57 is S,Q, W, or R, X58 is -,D, or G, X59 is Y,P, or R, X60 is F,S,G,N or T, X61 is Y,A, or H, X62 is A,-, or V, X63 is F or M, X64 is Y or V; X65 is T,L or M; and a VL region of SEQ ID NO 1161 wherein X1 is D or E; X2 Q or V; X3 is L,M; X4 is A,S or D; X5 is F,S or T; X6 is A,S; X7 is A,V; X8 is
[0094] P,V,L; X9 is D,E; X10 is A,V; X11 is I,L; X12 is T,S,N; X13 is K,R; X14 is
[0095] A,S; X15 is Q,D,S,G or E; X16 is S,D,N; X17 is V,I or L; X18 is -,K,Y,S or H; X19 is S,N; X20 is F,L,M; X21 is A,N,H; X22 is K,Q; X23 is A,P,V; X24 is K,R; X25 is
[0096] I, V; X26 is Y,G,W,N; X27 is T,A; X28 is S,K; X29 is T,N,R; X30 is L,R; X31 is E,A,V,H; X32 is S,E; X33 is A,S,V,D; X34 is D,E; X35 is T,K; X36 is S,R; X37 is A,S,P; X38 is F,V; X39 is A,G; X40 is T,V; X41 is Q,V; X42 is Q,N,H; X43 is F,L, Y, W,N,H; X44 is A,D,Y,S,N; X45 is is F, Y,T; X47 is F,Y,L; X48 Q,R,S,G,W,M; X46
[0097] is V,L; and X49 is D or E (wherein all aa per position are meant to be in the alternative “or” even if not explicitly stated).

[0098] Within said aspect, it is also envisaged in the context of the present invention to provide an antigen-binding molecule, wherein the first and/or the third (target) binding domain bind to MSLN and comprise a VH region of SEQ ID NO: 1165 wherein (the number behind the “X” indicates the numerical order of the “X” in respective amino acid sequence in N- to C-orientation in the sequence table) X1 is E,Q; X2 is V,L,Q, X3 is E,Q; X4 is A,G,P; X5 is E,G; X6 is V,L; X7 is V,K; X8 is K,Q; X9 is G,S; X10 is E,A,G,R; X11 is S,T; X12
[0099] is V,L; X13 is R,S,K; X14 is V,L; X15 is S,T; X16 is A,K,T; X17 is A,V; X18
[0100] is Y,I,F; X19 is S,T; X20 is S,F; X21 is S,T; X22 is D,G,S; X23 is Y,G,A,F; X24 is I, W,M; X25 is G,S,V,T,H; X26 is I, V; X27 is A,P; X28 is M,K,Q; X29 is G,C; X30 is I,M, V,L; X31 is A,G,S; X32 is A,S,N,W, Y, V; X33 is Y,S,N; X34 is Y,G,P,S; X35 is D,H,S,N; X36 is G,S; X37 is E,G,S; X38 is G,S,N,F,T,Q; X39 is S,K,W,D,I,-,T; X40 is Y,N; X41 is A,N; X42 is A,P,N,E,D,I,Q; X43 is D,A,S,K; X44
[0101] is V,L,F; X45 is K,Q; X46 is G,S; X47 is V,F; X48 is I,M; X49 is S,T; X50
[0102] is R,V; X51 is N,T; X52 is A,S; X53 is I,K; X54 is S,N; X55 is S,T,Q; X56
[0103] is A,L,F; X57 is Y,S,F; X58 is L,M; X59 is E,K,Q; X60 is M,L; X61 is S,N; X62
[0104] is R,S; X63 is V,L; X64 is R,T; X65 is A,S; X66 is D,A,E; X67 is R,K; X68
[0105] is D,E, V,L; X69 is E,R,G,P; X70 is R,A,N, Y; X71 is G,S,Y,V,H; X72
[0106] is A,P,F,D,Y; X73 is R,G; X74 is M,R,S,D; X75 is E,G; X76 is Y,L; X77 is Y, F; X78 is Y,S,F; X79 is A,G,S,T,H; X80 is L,M,F; X81 is Y,I,V; and X82 is L,M,T; and a VL region of SEQ ID NO 1169 (the number behind the “X” indicates the numerical order of the “X” in respective amino acid sequence in N- to C-orientation in the sequence table) X1
[0107] is E,S,D; X2 is Y,I,L; X3 is E,-,V,T; X4 is V,L,M; X5 is P,S; X6 is G,S; X7
[0108] is S,T; X8 is V,L; X9 is A, V,L; X10 is P,V; X11 is E,Q,D; X12 is R,T; X13
[0109] is A, V; X14 is S,T; X15 is I,L; X16 is S,T; X17 is A,S; X18 is G,S; X19
[0110] is E,Q; X20 is G,S,K; X21 is I,V,L,F; X22 is R,G,S; X23 is D,S,-; X24 is A,S,N,K,T; X25 is Y, WM; X26 is V,L; X27 is Y,A; X28 is K,Q; X29 is A,S,V; X30 is R,V,K; X31
[0111] is V,L; X32 is A,G,Q; X33 is A,S; X34 is S,T; X35 is G,S,K,I,T; X36 is R,L; X37 is A,P,Q; X38 is S,T; X39 is I, V; X40 is E,S,D; X41 is G,N; X42 is N,T; X43 is D,T; X44 is A,F; X45 is R,G,S; X46 is L,T; X47 is E,Q; X48 is A,P; X49 is E,M; X50 is E,F; X51 is D, V,T; X52 is A,Q; X53 is Y,S,A,T; X54
[0112] is G,E, Y,H,Q; X55 is A,S; X56 is S,T,F; X57 is P,T; X58 is R,A,L,F; X59
[0113] is V,T; X60 is P,C; X61 is V,L; X62 is E,T; X63 is I, V; and X64 is L,K (wherein all aa per position are meant to be in the alternative “or” even if not explicitly stated).

[0114] Within said aspect, it is also envisaged in the context of the present invention to provide an antigen-binding molecule, wherein the first and/or the third (target) binding domain comprise a VH region comprising CDR-H 1, CDR-H2 and CDR-H3 selected from SEQ ID NO: 77 to 79, 86 to 88, 95 to 97, 103 to 105, 111 to 113, 119 to 121, 127 to 129, 135 to 137, 143 to 145, 151 to 153, 159 to 161, 168 to 170, 177 to 179, 185 to 187, 194 to 196, 203 to 205, 212 to 214, 221 to 223, 230 to 232, 238 to 240, 334 to 336, 356 to 358, 365 to 367, 376 to 378, 385 to 387, and 194, 432 and 196, or any combination of CDR-H 1, CDR-H2 and CDR-H3 as disclosed together in the sequence table Tab. 50, preferably 86 to 88 and 194, 432 and 196.

[0115] Within said aspect, it is also envisaged in the context of the present invention to provide an antigen-binding molecule, wherein the first and/or third (target) binding domain comprise a VL region comprising CDR-L1, CDR-L2 and CDR-L3 selected from SEQ ID NO: 80 to 82, 89 to 91, 98 to 100, 106 to 108, 114 to 116, 122 to 124, 130 to 132, 138 to 140, 146 to 148, 154 to 156, 162 to 164, 171 to 173, 180 to 182, 188 to 190, 197 to 199, 206 to 208, 215 to 217, 224 to 226, 233 to 235, 241 to 243, 337 to 339, 359 to 361, 368 to 370, 379 to 381, 388 to 390, preferably 89 to 91 and 197 to 199.

[0116] Within said aspect, it is also envisaged in the context of the present invention to provide an antigen-binding molecule, wherein the first and/or third (target) binding domain comprise a VH region selected from SEQ ID NO: 83, 92, 101, 109, 117, 125, 133, 141, 149, 157, 165, 174, 183, 191, 200, 209, 218, 227, 236, 244, 340, 362, 371, 382, 391 and 433, preferably 433 and 92 and for the first and third binding domain, respectively.

[0117] Within said aspect, it is also envisaged in the context of the present invention to provide an antigen-binding molecule, wherein the first and/or third (target) binding domain comprises a VL region selected from SEQ ID NO: 84, 93, 102, 110, 118, 126, 134, 142, 150, 158, 166, 175, 184, 192, 201, 210, 219, 228, 237, 245, 341, 363, 372, 383, 392, preferably 200 and 93 for the first and third binding domain, respectively.

[0118] Within said aspect, it is also envisaged in the context of the present invention to provide an antigen-binding molecule, wherein the first and/or third (target) binding domain comprises a VL region of increased stability by a single amino acid exchange (E to I), selected from SEQ ID NO: 85, 94, 193, 202, 211, 220, 229, 364, 384, 393, preferably 94 and 202.

[0119] Within said aspect, it is also envisaged in the context of the present invention to provide an antigen-binding molecule, having an amino acid sequence selected from the group consisting of SEQ ID NOs: 246 to 323 or 330 to 332, 351 to 355, 373 to 375, 394 to 410 and 434, preferably 434.

[0120] In a second aspect, it is further envisaged in the context of the present invention to provide a polynucleotide encoding an antigen-binding molecule of the present invention, preferably selected from SEQ ID NO: 1070 to 1072 and 1074.

[0121] In a third aspect, it is also envisaged in the context of the present invention to provide a vector comprising a polynucleotide of the present invention.

[0122] In a fourth aspect, it is further envisaged in the context of the present invention to provide a host cell transformed or transfected with the polynucleotide or with the vector of the present invention.

[0123] In a fifth aspect, it is also envisaged in the context of the present invention to provide a process for the production of an antigen-binding molecule of the present invention, said process comprising culturing a host cell of the present invention under conditions allowing the expression of the antigen-binding molecule and recovering the produced antigen-binding molecule from the culture.

[0124] In a sixth aspect, it is further envisaged in the context of the present invention to provide a pharmaceutical composition comprising an antigen-binding molecule of the present invention or produced according to the process of the present invention.

[0125] Within said aspect, is also envisaged in the context of the present invention that the pharmaceutical composition is stable for at least four weeks at about −20° ° C.

[0126] It is further envisaged in the context of the present invention to provide the antigen-binding molecule of the present invention, or produced according to the process of the present invention, for use in the prevention, treatment or amelioration of a disease selected from a proliferative disease, a tumorous disease, cancer or an immunological disorder.

[0127] Within said aspect, it is also envisaged in the context of the present invention that the disease preferably is acute myeloid leukemia (AML), Non-Hodgkin lymphoma (NHL), Non-small-cell lung carcinoma (NSCLC), pancreatic cancer and Colorectal cancer (CRC)]. In a seventh aspect, it is further envisaged in the context of the present invention to provide a method for the treatment or amelioration of a proliferative disease, the method comprising administering to a subject in need thereof a molecule comprising at least one polypeptide chain, wherein the molecule comprises
[0128] (i.) a first binding domain which preferably comprises a paratope which specifically binds to a first target cell surface antigen (e.g. TAA1),
[0129] (ii.) a second binding domain which preferably comprises a paratope which specifically binds to an extracellular epitope of the human—and preferably the Macaca—CD3ε chain,
[0130] (iii.) a third binding domain which preferably comprises a paratope which specifically binds to a second target cell surface antigen (e.g. TAA2), and
[0131] (iv.) a fourth binding domain which preferably comprises a paratope which specifically binds to an extracellular epitope of the human—and preferably the Macaca—CD3ε chain,
[0132] wherein the first binding domain and the second binding domain form a first bispecific entity and the third and the fourth binding domain form a second bispecific entity, and
[0133] wherein the molecule comprises a spacer entity having a molecular weight of at least about larger than about 5 kDa and/or having a length of more than 50 amino acids, wherein the spacer entity spaces apart the first and the second bispecific entity by at least about 50 Å (distance between centers of mass of the first and the second bispecific entity), and which spacer entity is positioned between the first and the second bispecific entity.

[0134] Within said aspect, it also envisaged in the context of the present invention also provides a method to address a disease-associated target being significantly co-expressed on a pathophysiological and one or more physiological tissues by providing a multitargeting bispecific antigen-binding molecule of the format described herein, wherein the molecule addresses (i.) the target expressed both on the disease-associated and the physiological tissue and (ii.) a further target which is disease associated but not expressed on the physiological tissue under (i.), wherein the method preferably avoids the formation of intra-abdominal adhesions and/or fibrosis where such target is MSLN.

[0135] Within said aspect, it is also envisaged in the context of the present invention that the disease preferably is a tumorous disease, cancer, or an immunological disorder, comprising the step of administering to a subject in need thereof the antigen-binding molecule of the present invention, or produced according to the process of the present invention, wherein the disease preferably is acute myeloid leukemia, Non-Hodgkin lymphoma, Non-small-cell lung carcinoma, pancreatic cancer and/or Colorectal cancer.

[0136] Within said aspect, it is also envisaged in the context of the present invention that TAA1 and TAA2 are preferably selected from EpCAM and MSLN, MSLN and EpCAM, MSLN and CDH3, CDH3 and MSLN, FLT3 and CLL1, and CLL1 and FLT3.

[0137] In an eighth aspect, it is also envisaged in the context of the present invention to provide a kit comprising an antigen-binding molecule of the present invention, or produced according to the process of the present invention, a polynucleotide of the present invention, a vector of the present invention, and/or a host cell of the present invention.

[0138] In a ninth aspect, it is also envisaged in the context of the present invention to provide a molecule comprising at least one polypeptide chain, wherein the molecule comprises, from N-terminus to C-terminus:
[0139] (i.) a first binding domain which specifically binds to a first target cell surface antigen (e.g. TAA1),
[0140] (ii.) a second binding domain which specifically binds to a second target cell surface antigen (e.g. TAA2),
[0141] (iii.) a spacer entity,
[0142] (iv.) a third binding domain which specifically binds to an extracellular epitope of the human and/or the Macaca CD3ε chain, and
[0143] (v.) a fourth binding domain which specifically binds to an extracellular epitope of the human and/or the Macaca CD3ε chain,
[0144] wherein the spacer entity spaces apart the second and the third binding domains by more than about 50 Å.

### DESCRIPTION OF THE FIGURES

[0145] FIG. 1: Overview of multitargeting bispecific antigen-binding molecules disclosed in the invention. Domain arrangement in each molecule as follows: A: target binding domain×CD3 binding domain×spacer×target binding domain×CD3 binding domain; B: target binding domain×CD3 binding domain×spacer×CD3 binding domain×target binding domain; C: target binding domain×target binding domain×spacer×CD3 binding domain×CD3 binding domain; D: target binding domain×target binding domain×CD3 binding domain×CD3 binding domain×spacer; E: target binding domain×target binding domain×CD3 binding domain×spacer×CD3 binding domain; F: target binding domain×spacer×target binding domain×CD3 binding domain×CD3 binding domain

[0146] FIG. 2: FIG. 2 shows cytotoxicity curves and EC50 values of dual targeting CLL1-FLT3 bispecific antigen-binding molecules and mono targeting control bispecific antigen-binding molecules on double positive CHO huCLL1 huFLT3 target cells and single positive CHO huCLL1 or CHO huFLT3 target cells. Effector cells were unstimulated Pan T-cells. b.c.t: below calculation threshold

[0147] FIG. 3: FIG. 3A to H shows cytotoxicity curves of EpCAM MSLN T-cell engager molecules and mono targeting control T-cell engager molecules on double positive CHO huEpCAM huMSLN target cells and single positive CHO huEpCAM or CHO huMSLN target cells. Effector cells were unstimulated Pan T-cells.

[0148] FIG. 4: FIG. 4A shows Cytotoxicity curves of EpCAM MSLN T-cell engager molecules on double positive CHO huEpCAM huMSLN target cells and single positive CHO huEpCAM or CHO huMSLN target cells. Effector cells were unstimulated Pan T-cells. FIG. 4B shows Cytotoxicity curves of EpCAM MSLN T-cell engager molecules on double positive CHO huEpCAM huMSLN target cells and single positive CHO huEpCAM or CHO huMSLN target cells. Effector cells were unstimulated Pan T-cells. FIG. 4C shows Cytotoxicity curves of CLL1-FLT3 T-cell engager molecules on double positive CHO huCLL1 huFLT3 target cells and single positive CHO huCLL1 or CHO huFLT3 target cells. Effector cells were unstimulated Pan T-cells.

[0149] FIG. 5: FIG. 5 shows cytotoxicity curves of EpCAM MSLN T-cell engager molecules on double positive CHO huEpCAM huMSLN target cells and single positive CHO huEpCAM or CHO huMSLN target cells. Effector cells were unstimulated Pan T-cells.

[0150] FIG. 6: FIG. 6A shows cytotoxicity curves of CLL1-FLT3 T-cell engager molecules on double positive CHO huCLL1 huFLT3 target cells and single positive CHO huCLL1 or CHO huFLT3 target cells. Effector cells were unstimulated Pan T-cells. FIG. 6B shows cytotoxicity curves of EpCAM MSLN T-cell engager molecules on double positive CHO huEpCAM huMSLN target cells and single positive CHO huEpCAM or CHO huMSLN target cells. Effector cells were unstimulated Pan T-cells. FIG. 6C shows Cytotoxicity curves of CLL1-FLT3 T-cell engager molecules on double positive CHO huCLL1 huFLT3 target cells and single positive CHO huCLL1 or CHO huFLT3 target cells. Effector cells were unstimulated Pan T-cells.

[0151] FIG. 7: FIG. 7 shows cytotoxicity curves of CLL1-FLT3 (FIG. 7A) and CDH3-MSLN vs. CDH3 and MSLN monotargeting (FIG. 7G) T-cell engager molecules, respectively, on double positive CHO huCLL1 huFLT3 and GSU Luc CDH3 MSLN target cells after 48 h, and released cytokines IL-2, IL-6, IL-10, TNFα und IFNγ after 24 h (FIGS. 7B-F and H-L, respectively. Effector cells were unstimulated PBMC.

[0152] FIG. 8: FIG. 8 shows cytotoxicity curves and EC50 values of MSLN-CDH3 T-cell engager molecule 1 on double positive cell line HCT 116 (WT) and CDH3 respectively MSLN Knockout (KO) cell lines. Effector cells were unstimulated Pan T-cells.

[0153] FIG. 9: FIG. 9 shows cytotoxicity curves and EC50 values of MSLN-CDH3 T-cell engager molecule 1 on double positive cell line SW48 (WT) and CDH3 respectively MSLN Knockout (KO) cell lines. Effector cells were unstimulated Pan T-cells.

[0154] FIG. 10: FIG. 10 shows cytotoxicity curves of CLL1-FLT3 T-cell engager molecules on double positive CHO huCLL1 huFLT3 target cells and single positive CHO huCLL1 or CHO huFLT3 target cells. Effector cells were unstimulated Pan T-cells.

[0155] FIG. 11: FIG. 11 sows cytotoxicity curves of MSLN-CDH3 T-cell engager molecules and Mono-targeting T-cell engager molecules on naïve double positive GSU cells versus target-knockout GSU cells. Effector cells were unstimulated Pan T-cells.

[0156] FIG. 12: FIG. 12 shows cytotoxicity curves and EC50 values of CLL1-FLT3 T-cell engager molecules on double positive CHO huCLL1 huFLT3 target cells and single positive CHO huCLL1 or CHO huFLT3 target cells. Effector cells were unstimulated Pan T-cells.

[0157] FIG. 13: FIG. 13 shows cytotoxicity curves of EpCAM-MSLN T-cell engager molecules on double positive Ovcar8 Wildtype cells and single positive Ovcar8 MSLN KO or Ovcar8 EpCAM KO target cells. Effector cells were unstimulated Pan T-cells.

[0158] FIG. 14: FIG. 14 shows MSLN-CDH3 T-cell engaging cytotoxicity assays Effector cells: human unstimulated T cells with Target cells being (A molecule 1, B molecule 2) GSU wt, GSU KO CDH3, GSU KO MSLN and (C molecule 1, D molecule 2) HCT 116 wt, HCT 116 KO CDH3, HCT 116 KO MSLN.

[0159] FIG. 15: FIG. 15 shows an Overlay (x and y-normalized) of UV280 trace from Cation exchange chromatography of MSLN-CDH3 T-cell engager molecule 1 and 2.

[0160] FIG. 16: FIG. 16 shows in vivo dose-dependent tumor growth inhibition by CDH3×MSLN multitargeting bispecific antigen-binding molecule having SEQ ID NO 251 in a xenograft mouse model.

[0161] FIG. 17: FIG. 17(A-L) shows modeled mean and maximum distances over time (200 or 400 ns) between centers of mass of the two bispecific entities of an exemplary bispecific antigen-binding molecule with spacers G4S, scFc, scFc-scFc, (G4S)10, (EAAAK)10, has, PD1, ubiquitin, SAND, Beta-2-microblobulin, and HSP70-1. FIG. 17M shows visualizations of modelings of Beta-2-microblobulin, and HSP70-1. FIGS. 17N and O shows modeled mean and maximum distances over time (200 ns) between centers of mass of the two bispecific entities an exemplary bispecific antigen-binding molecules with scFc as spacer and with target binders MSLN-FOLR1 and MSLN-CDH19, respectively.

[0162] FIG. 18: FIG. 18 shows increased activity of a CD20×CD22 multitargeting antigen-binding molecule with two high affinity CD binders in the format according to the present invention.

[0163] FIG. 19: FIG. 19 shows an example cytotoxicity assay in which human T cells were incubated with the human gastric cancer cell line GSU Luc at an ET ratio of 10:1 for 72 hours. The resulting EC₅₀ values were within a similar range (2.078 μM for MSLN monotargeting molecule 1 (SEQ ID NO: 1183) versus 1.060 μM for CDH3-MSLN multitargeting molecule 2 (SEQ ID NO: 251), respectively, see Figure A).

[0164] FIG. 20: FIG. 20 shows histopathological glass slides which were scanned to generate whole slide images (WSI) in .svs format. WSI were viewed using Aperio eSlide Manager (Leica Biosystems, Version 12.3.3.5049, ª 2006-2017). Individual still images were grabbed using Snipping Tool (Microsoft Office) from the Aperio viewer and saved in jpg format. FIGS. 20A and B show liver of an cynomolgus monkey treated with 1.5 μg/kg monotargeting MSLN bispecific antigen-binding molecule (SEQ ID NO: 1183, molecule 1), magnification 4.4× (A) or with 1000 μg/kg multitargeting CDH3-MSLN bispecific antigen-binding molecule (SEQ ID NO: 251, molecule 2), magnification 8.4× (B). (B, C): Lung of an animal treated with 1.5 μg/kg molecule 1, magnification 4.4× (C) or with 1000 μg/kg molecule 2, magnification 8.4× (D).

[0165] FIG. 21: Cytotoxicity curves of single-chain vs. dual-chain MSLN-CDH3 T-cell engager molecules and corresponding Mono-targeting T-cell engager molecules, respectively, on naïve double positive GSU cells versus target-knockout GSU cells. Effector cells were unstimulated Pan T-cells.

[0166] FIG. 22: Cytotoxicity curves of MSLN-CDH3 T-cell engager molecules and Mono-targeting T-cell engager molecules on naïve double positive GSU cells versus target-knockout GSU cells, wherein the CD3 binders were varied, i.e. I2C, 12M2 and I2M instead of I2L. Effector cells were unstimulated Pan T-cells.

[0167] FIG. 23: FIG. 23(A-H) shows MSLN-CDH3 T-cell engaging cytotoxicity assays with Effector cells: human stimulated T cells and Target cells: HCT 116 wt, HCT 116 KO CDH3, HCT 116 KO MSLN, wherein selectivity gaps of CDH3 epitope cluster D4B is compared with CDH3 epitope clusters D1B, D2C and D3A.

[0168] FIG. 24: FIG. 24(A-E) shows MSLN-CDH3 T-cell engaging cytotoxicity assays with Effector cells: human stimulated T cells and Target cells: CHO hu CDH3 (+) & MSLN (+), CHO hu CDH3 (+), CHO hu MSLN (+), wherein selectivity gaps of MSLN epitope cluster E1 is compared with MSLN epitope cluster E2/E3.

[0169] FIG. 25: human CDH3, sequence below: mouse CDH3 with transmembrane and cytoplasmic domain of EpCAM. Sequence alignment of the CDH3 protein shows each human sequence part (D1, D2, D3, D4, D5 and the respective subparts A, B and C) that was replaced with the corresponding mouse sequence and which amino acids differ between the two species.

[0170] FIG. 26: Flow Cytometry Binding Analysis of CDH3 Antibody and T Cell Engager K3T on Transfected CHO Cells Expressing Full-length Human CDH3 or Mouse CDH3×EpC Protein or Human/Mouse Chimeric CDH3×EpC Protein Constructs

[0171] FIG. 27: Sequence alignment of the MSLN protein shows each human sequence epitope section (E1, E2, E3, E4, E5 and E6) that was replaced with the corresponding mouse sequence and which amino acids differ between the two species.

[0172] FIG. 28: Flow Cytometry Binding Analysis of T Cell Engager K3T and F5Q on Transfected CHO Cells Expressing Full-length Human MSLN Protein or Full-length Mouse MSLN Protein or Human/Mouse Chimeric MSLN Protein Constructs

### DETAILED DESCRIPTION

[0173] In the context of the present invention, a multitargeting bispecific molecule is provided comprising at least five distinctive structural entities, i.e. (i.) a first domain binding to a target cell surface antigen (e.g. a first tumor associated antigen, TAA), (ii.) a second domain binding to an extracellular epitope of the human—and preferably non-human, e.g. Macaca—CD3ε chain, wherein the first binding domain and the second binding domain together form a first bispecific entity, (iii.) a spacer which connects but spaces apart the first bispecific entity from a second bispecific entity comprising (iv.) a third domain binding to the same or preferably a different target cell surface antigen (e.g. a second TAA), and (v.) a fourth domain binding to an extracellular epitope of the human—and preferably non-human, e.g. Macaca—CD3ε chain. Molecules of the format of the present invention typically exhibit the advantage to be characterized by avidity-driven potency and specificity from two targets being co-expressed on the target cell, which typically leads to a reduction of undesired cytokine release (and associated clinically relevant side effects such as CRS) while at the same time ensuring effective antitumor activity, preferably also in solid tumors such as colorectal cancer, non-small-cell lung carcinoma and pancreatic cancer.

[0174] It is a surprising finding in the context of the present invention that bispecific (T-cell engaging) multitargeting molecules according to the present invention provides a double avidity effect, both on the target cell binder and the effector cell binder side due to their specific format which leads to an efficient each other complementing target cell kill. This effect is facilitated by the molecule format specifically targeting two (different) antigens on one target cell, such as a cancer cell, and in contrast, by significantly less targeting non-target cells while mediating a potent T-cell response against said target cell at the same time. By being capable to address two target antigens at the same time, the likeliness of targeting a target cell associated with a disease instead of a physiologic cell is greatly increased when two TAAs are chosen which are typically associated with a target cell associated with a disease. Hence, a T-cell engaging multitargeting molecule according to the present invention, which is typically singe-chained, both provides improved efficacy and safety with regard to existing bispecific antibodies or antibody-derived constructs which are T-cell engaging. Said advantageous properties are preferably achieved by the fact that the multitargeting bispecific molecules of the present invention comprise two bispecific entities comprising each a target binding domain and an effector (CD3) binding domains which can act in a pathophysiologic environment without (e.g. sterically) hindering each other while complementing each other at the same time. Said action of the two bispecific entities within the one multitargeting bispecific molecule of the present invention from each other means that the target binding domain (e.g. the first domain) and the effector CD3 binding domain (e.g. the second domain) of the first bispecific entity can interact with their respective binding partners to form a cytolytic synapse between target cell and T-cell, without disturbing interaction of or with the target binding domain (e.g. the third domain) and the effector domain (e.g. the forth domain) of the second bispecific entity. However, in order to provide the desired action and, in consequence, therapeutic function, preferably both target binding domains of both the first and the second bispecific entity must engage their respective target in order to involve the effector CD3 binding domains of the first and second bispecific entity completely. Further, it was a surprising finding that the two respective bispecific entities must be functionally preserved by structural separation in the molecule format in a specific manner in order to benefit from the double avidity effect required to achieve the extraordinary efficacy described and safety implied herein.

[0175] As a secondary effect in addition or alternatively to the herein described increased specificity, and therefore safety, the likeliness of targeting a target cell such as a cancer cell by a multitargeting antigen-binding molecule versus a monotargeting molecule is greatly increased once such target cell has undergone antigen loss and, thus, is prone to tumor escape from effective anti-tumor therapy because one valid antigen to target remains on the cell which has undergone antigen escape. Said effect in terms of increased activity compared to molecules comprising only one CD3 binder and/or target binder and do not comprise the two linked but spaced apart bispecific entities is preferably achieve when both CD3 binders are of high affinity, such as a CD3 binding domain comprising a VH and VL of, for example, SEQ ID NOs 67 and 68, respectively, linked by a linker of SEQ ID NO 1 or 3.

[0176] The above-specified finding underlying the present invention is surprising in view of the teaching of the prior art. For example, antigen-binding formats comprising more than one target binding domain and effector binding domain, respectively, are known in the art, e.g. the Adaptir™ format. However, such formats do not provide two bispecific entities which can individually interact with their respective target and effector and work together at the same time and, consequently, cannot achieve the effect of double avidity on both the target binder and the effector binder side to the extent of effectively provide a large selectivity gap to the advantage of the multitargeting molecule. According to the present invention, the two bispecific entities must be spaced apart from each other by a certain distance, preferably of at least 50 Å, more preferably at least 60, 70, 80, 90 or at least 100 Å. The indicated distance [Å] between the two bispecific entities is typically understood in the context of the present invention as the distance between the centers of mass of the two bispecific entities, respectively. In general, the center of mass (COM) of a distribution of mass (here, a bispecific entity comprising a binding domain which binds to a target cell surface antigen and a binding domain which binds to an extracellular epitope of the human—and preferably the Macaca—CD3ε chain, both binding domains preferably in scFv or, alternatively, in scFab format and linked by a peptide linker) in space is understood as the unique point where the weighted relative position of the distributed mass sums to zero. The distance is typically determined by molecular modeling making use of generally accepted modeling programs (MD/visualization software) which can identify COMs given input structures and such as PyMOL (The PyMOL Molecular Graphics System, Version 2.3.3. Schrödinger, LLC.) which is typically based on ensembles of snapshot structures from MD simulations. The mass of each atom is typically part of an underlying “force field” as generally known in the art. Alternatively and/or additionally, distances can be determined by crystallography, cryo electron microscopy, or nuclear magnetic resonance analytic technology.

[0177] A typical approach of obtaining distances through molecular modeling as given in the present invention is as follows:
[0178] 1) Obtaining an atomistic structure of the complete bispecific antigen-binding molecule. Structure sources may be selected from the group consisting of:
   [0179] a. Protein X-ray crystallography with resolution preferably below 5 Å enabling visibility of amino acid backbones and side-chains;
   [0180] b. Cryogenic electron microscopy (cryo-EM) with resolution preferably below 5 Å enabling visibility of amino acid backbones and side-chains;
   [0181] c. In silico homology modeling of the entire molecule based on a single, highly-homologous crystal and/or cryo-EM structure (preferably above 60% sequence identity);
   [0182] d. In silico homology modeling involving linking 2 or more experimental structures. The structures are preferably identical or highly homologous (preferably above 60% sequence identity) to domains found in the complete bispecific antigen-binding molecule. In case of lack of experimental linker conformations, the model is preferably refined in an explicit-solvent Molecular Dynamics (MD) simulation (simulation length of preferably at least 100 ns unless energy convergence is obtained faster). The simulation is carried out with a state-of-the-art software (e.g. Schrodinger, Amber, Gromacs, NAMD or equivalent) with parameters corresponding to room temperature and pressure. No artificial forces are applied during the simulation (i.e. preferably excludes methods such as metadynamics or steered molecular dynamics). Similarly, preferably no artificial geometrical restraints are imposed on the molecule.
[0183] 2) Identifying centers of mass (COM) of the relevant molecule domains. This is typically performed with the used MD software or with visualization tools such as PyMOL or VMD. The centers of mass can be defined as a pseudo-atoms or non-hydrogen atoms closest to the true COM. Inter-domain linkers are typically not considered as part of the domain.
[0184] 3) Using the same software, report the distance (in Angstrom, Å) between the two COMs. If an MD simulation was used to refine a homology model (as described in 1d), the median distance over multiple simulation snapshots is reported. To further diminish potential inaccuracy of the initial model, at least the first 10% of the simulation, preferably up to 50% if the signal significantly changes, are omitted when calculating the median distance between COMs and when extracting the snapshots for visualizing the MD simulation.

[0185] If not indicated otherwise, distances [A] in the context of the present invention are median distances as determined by MD simulations.

[0186] The preferred distance between the first and the second bispecific entity as disclosed herein is facilitated by a spacer entity (in short spacer) between the two bispecific entities which spaces the two bispecific entities apart and keeps them in a separated position. The spacer is of a certain size, preferably at least more than 5 kDa, more preferably at least about 10, 15, 20, 25, 30, 35, 40, 45 or even at least 50 kDa and hereby prevents an undesired interaction of the two separated bispecific entities. The preferred range in molecular size of the spacer is about 15 to 200 kDa, preferably about 15 to 150 kDa, in order to facilitate the separation of the two bispecific entities according to the present invention and to maintain a high overall activity of the molecule. Typically, too large spacers, e.g. larger than about 200 kDa, may impact the ability of the two bispecific entities to bind to two target surface structures on the same target cell which in turn may reduce the overall activity of the molecule against the target cell. Hence, the typical maximum preferred size in terms of molecular weight of the spacer is about 200 kDa, preferably about 150 or 120 kDa and even more preferably about 100 kDa. A typical spacer of maximum preferred size is a double scFc domain as disclosed herein (two scFc linked to each other forming one larger single chain spacer) of about 105.7 kDa. Example sizes of spacers which typically sufficiently separate the two bispecific entities are PSI domain of Met-receptor of about 5.3 kDa, ubiquitin of about 8.6 kDa, fibronectin type III domain from tenascin of about 10.1 kDa, SAND domain of about 11 kDa, beta-2-microglobulin of about 11.9 kDa, Tim-3 (aa 24-130) of about 12.2 kDa, MiniSOG of about 13.3 kDa, SpyCatcher of about 12.1 kDa associated with SpyTag of about 1.7 kDa linked together preferably via isopeptide bond formation to form a two-chain-spacer of about 13.8 kDa, VHH antibody lama domain of about 14 kDa, PD-1 binding domain from human programmed cell death 1 ligand (PDL1) of about 14.4 kDa, granulocyte-macrophage colony stimulating factor (GM-CSF) of about 14.5 kDa, intrleukin-4 of about 15 kDa, interleukin-2 of about 15.4 kDa, CD137L (4-1BBL; TNFSF9) cctodomain of about 17.7 kDa, programmed cell death protein 1 (PD-1) of about 16.6 kDa, green fluorescent protein (GFP) of about 26.3 kDa, single chain Fc region (scFc) as described herein of about 52.8 kDa (about 54.6 kDa with N- and C-terminal linkers (G₄S)₃, respectively), human serum albumin (HSA) of about 66.5 kDa (about 68.3 kDa with N- and C-terminal linkers (G₄S)₃, respectively) and double scFc (two scFc linked to cach other forming one larger single chain spacer) of about 105.7 kDa (about 107.5 kDa with N- and C-terminal linkers (G₄S)₃, respectively). In general, the more rigid the spacer is, the less is the median distance required which otherwise has to include a safety margin for flexible spacers.

[0187] Also, a preferred spacer in the context of the present invention, such as a globular domain, typically has a N- and a C-terminus which are spatially not too close to each other in order to efficiently space apart the two bispecific entities according to the invention. In this regard, spacers typically show a distance between the N- and the C-terminus which is significantly larger than 10 Å. A distance between N- and C-terminus of the spacer which is lower or about 10 Å is considered “close”. Hence, a spacer in the context of the present invention preferably has a distance between the alpha-carbon atoms of the first amino acid located at the N-terminus and the last amino acid at the C-terminus of at least 20 Å, more preferably at least 30 Å, even more preferably at least 50 Å, which distance typically ensures to space the first and the second bispecific entity apart by at least 50 Å as described herein. Alpha-carbon (α-carbon) is understood herein as a term that applies to proteins and amino acids. It is the backbone carbon before the carbonyl carbon atom in the molecule. Therefore, reading along the backbone of a typical protein would give a sequence of —[N—Ca-carbonyl C]n-etc. (when reading in the N to C direction). The α-carbon is where the different substituents attach to each different amino acid. That is, the groups hanging off the chain at the α-carbon are what give amino acids their diversity. Hence, in the context of the present invention, a spacer is less preferred, even if it has a size of at least 5 kDa and a length of more than 50 aa if the distance between the alpha-carbon atoms of the first amino acid located at the N-terminus and the last amino acid at the C-terminus is too close, i.e. if it is only, e.g., about 10 Å. For example, preferred spacers show typical distances between the alpha-carbon atoms of the first amino acid located at the N-terminus and the last amino acid at the C-terminus as follows: scFc (based on 5G4S crystal structure) 89 Å, HSA (based on 5VNW crystal structure): 77 Å, ubiquitin (based on 1UBQ crystal structure): 37 Å and SAND (based on 10QJ crystal structure): 32 Å. In contrast, HSP70-1 (based on 3JXU crystal structure) shows only a distance of 9 Å between the alpha-carbon atoms of the first amino acid located at the N-terminus and the last amino acid at the C-terminus. At the same time, HSP70-1 provides only a median distance between the COMs of first and the second bispecific entity in the context of the present invention of about 48 Å which is below the threshold of 50 Å median distance, and significantly below the typically about 60-100 Å median distance between the COMs of the two bispecific entities as facilitates by preferred spacers such as scFc. HSA, ubiquitin and SAND. Thereof, scFc (SEQ ID NO: 25) is preferred.

[0188] Alternatively, a non-globular but rigid linker may serve as a spacer in the context of the present invention which spaces apart the two bispecific entities. Such linkers comprise (PA)25P (SEQ ID NO: 1097) and A(EAAAK)4ALEA(EAAAK)4A (SEQ ID NO: 1096), even if the Mw is below 5 kDa (here 4.3 kDa) and the amino acid length is only about or below 50 (51 and 46 aa, respectively). However, such spacers are typically less preferred than globular domains which preferably additionally increase half-life.

[0189] As it is also contemplated within the context of the present invention, the spacer between the two bispecific entities is a polypeptide which typically comprises more than 50 amino acids, preferably at least about 75, 100, 150, 200, 250, 300, 350, 400, 450 or at least 500 amino acids. The preferred range in amino acid length of the spacer is about 100 to 1500 amino acids, preferably about 100 to 1000 amino acids, more preferably about 250 to 650 amino acids in order to facilitate the separation of the two bispecific entities according to the present invention. This is to preferably maintain a high overall activity of the entire molecule according to the present invention (not necessarily of the individual and spaced-apart bispecific entities, which may have low affinities (and low activities) individually in order to increase specificity for double positive target cells) which is typically be below 20 μM, preferably below 5 μM, more preferably below 1 μM. Typically, too large spacers, e.g. longer than about 1500 amino acids, may impact the ability of the two bispecific entities to bind to two target surface structures on the same target cell which in turn may reduce the overall activity of the molecule against the target cell. Hence, the typical maximum preferred length of the spacer is about 1500 amino acids, more preferably about 1000 amino acids. Example amino acid lengths of spacers which sufficiently separate the two bispecific entities are PD-1 of about (ECD 25-167) 143 aa, scFc as described herein of about 484 aa (about 514 aa with N- and C-terminal linkers (G₄S)₃, respectively), HSA of about 585 aa (about 615 aa with N- and C-terminal linkers (G₄S)₃, respectively), and double scFc of about 968 aa (about 998 aa with N- and C-terminal linkers (G₄S)₃, respectively). Further spacers include, ubiquitin of about 76 aa, fibronectin type III domain from tenascin of about 90 aa, SAND domain of about 90 or 97 aa, beta-2-microglobulin of about 100 aa, Tim-3 (aa 24-130) of about 108 aa, MiniSOG of about 115 aa, SpyCatcher of about 113 aa associated with SpyTag of about 14 aa linked together preferably via isopeptide bond formation to form a two-chain-spacer of about 127, VHH antibody lama domain of about 129 aa, PD-1 binding domain from human programmed cell death 1 ligand (PDL1) of about 126 aa, granulocyte-macrophage colony stimulating factor (GM-CSF) of about 127 aa, interleukin-4 of about 129 aa, interleukin-2 of about 133 aa, CD137L (4-1BBL; TNFSF9) ectodomain of about 167 aa, and green fluorescent protein (GFP) of about 238 aa.

[0190] The composition and arrangement of the preferred spacer amino acid sequences preferably confer a certain rigidity and are not characterized by high flexibility. Rigidity in the context of the present invention is typically present when a spacer of more than 50 aa and/or a molecular weight over 5 kDa facilitates a maximum distance between the centers of mass of the two bispecific entities in a molecule according to the present invention which is smaller than 200% (or 2-fold) the median distance. Accordingly, a preferred rigid spacer in the context of the present invention does not extend further than about 100% of its median length, more preferably not more than about 80% (each calculated as distance between centers of mass of the two bispecific entities). Hence, a preferred rigid spacer in the context of the present invention which spaces apart the two bispecific entities by about 100 Å (median distance) does not extend further than to 200 Å (maximum distance). For example, a typical median distance between centers of mass of the bispecific entities of a molecule having the format of the present invention comprising a scFc (such as SEQ ID NO: 25) as spacer is about 101 Å. However, a maximum distance in such a case is typically about 182 Å, i.e. not more than about 100% or even only about 80% with respect to the median distance. Such a spacer is considered rigid in the context of the present invention. In contrast, a molecule comprising a (G₄S)₁₀ (SEQ ID NO: 8) as spacer, which is a liner polypeptide without a e.g. globular structure, shows a typical a median distance of about 48 Å and a maximum distance of about 179 Å. Hence, such a spacer as (G₄S)₁₀ shows a high flexibility and not the rigidity of a preferred spacer as advantageous feature according to the present invention. In this regard, spacer amino acid sequences may typically be rich in proline and less rich in serine and glycine. Especially envisaged are spacers which are folded polypeptides e.g. of secondary order (e.g. helical structures) or of ternary order forming e.g. three dimensional protein domains structures which in turn ensure a certain rigidity by their constitution and preferably confer further advantageous effects such as in vivo half-life extension of the multitargeting bispecific molecule as a therapeutic agent. Typical domain structures comprise hydrophobic cores with hydrophilic surfaces. In the context of the present invention, proteins having a structure of a globular protein are preferred as spacers. Globular proteins are understood in the context of the present invention to be spherical (“globe-like”) proteins and are one of the common protein types. Globular proteins in the context of the present invention may be characterized by a globin fold. Spacers comprising an Fc domain or parts or a multiple thereof, a PD-1 or an HSA domain are in particular envisaged. Also envisaged are spacers which comprise combinations of different globular proteins or parts thereof, which even more preferably comprise a Fc receptor binding function in order to increase the half-life of the molecule according to the present invention. The format described herein with the separation of the two bispecific entities has distinctive advantages. If only one target is present which is addressed by the first binding domain, then the first domain “uses” only the second domain engage a T cell but not the fourth domain, or alternatively, the third domain uses the fourth but not the second (or to a much lesser extend due to the spacer). If only one target is present, the Kd of preferably low affinity CD binder as disclosed herein prevents efficient T-cell engagement. Thus, selectivity is increased with respect to other (dual) targeting molecules.

[0191] If both targets are present, the BiTE² binds more firmly to the target cell (by avidity gain) and both I2L can be used to engage T cells (also by avidity gain), for example the second domain binding to a CD3 domain on an effector T cell and the third domain binding to a target antigen are less likely to form a cytolytic synapse and therefore do not act together as a bispecific entity which would otherwise lead to less beneficial cytotoxic activity profile. This has the advantage that the first and the fourth domain are not left “useless” which would mean that the full effect of the double avidity by double binding of a target and an effector binding domain, respectively, could not be made use of. Likewise, the first domain binding to a target antigen and the fourth domain binding to a CD3 domain on an effector T cell are prevented from theoretical interaction which would eventually render the second and the third domain useless for forming a cytolytic synapse with their intended “partner domains” in their respective bispecific entities.

[0192] Typically, the advantageous avidity effect conferred by a multitargeting bispecific molecule according to the present invention is indicated by a differential activity factor or “selectivity gap” between the activity of the molecule on double positive cells, i.e. a target cell which carries (i.) two different targets which combination is overexpressed on the cell type to be targeted and being associated with a particular disease and/or (ii.) one target at overexpressed levels. In either case, a molecule according to the present invention targeting two (preferably different) targets at the same time, will preferably bind to such a target cell in comparison to a non-target cell expressing either only one of two targets or the one target at lower expression levels and, in consequence, will induce a more pronounced T cell response. As it preferred for a multitargeting bispecific molecule of the present invention, the activity in terms of increased cytotoxicity as determined, for example, by lower EC50 values, is at least 100 times larger on target cells (e.g. characterized by expressing both different targets or the one target at high levels) than on non-target cells (e.g. characterized by expressing only one of two targets or the one target only at low levels). Said selectivity gap in the context of the present invention is preferably larger than 100 times. It is envisaged in the context of the present invention that the selectivity gap (which can also be defined as activity gap) is at least 250, 500, 750 or even 1000 times which greatly improves efficacy and safety of the present multitargeting bispecific molecule in comparison to monotargeting bispecific molecules of various formats.

[0193] A further aspect envisaged in the context of the present invention is the further support of the double avidity effect conferred by the format of the multitargeting antigen-binding molecule by means of a low affinity, preferably both of the target antigen binders and the CD3 effector binders. In the context of the present invention, a CD3 binder with an affinity below KD 1.2×10⁸ is preferred. Especially preferred are CD3 binders which have an activity which is 10 times lower, more preferably 50 times lower or even more preferred 100 times lower than that of a CD3 binder having a KD 1.2×10-8. Without wanting to be bound be theory, the avidity effect is contemplated to be more pronounced when two binders with relatively balanced, i.e. typically two low affinity binders bind to two targets on the same target cell compared to binders with mixed or, typically, higher affinity which would trigger cytolytic activity also if only one target on a cell was bound which could, for example, be a physiologic non-target cell which should not be targeted in order to avoid off-target toxicity and related side effects.

[0194] Accordingly, the multitargeting bispecific antigen-binding molecules according to the present invention which bind to two (preferably different) targets on a target cell in order to show significant cytotoxic activity preferably do show less side effects than monotargeting bispecific antigen-binding molecules which bring together effector T cell and target cell. This is demonstrated, for example, by a significant reduction in release of key cytokines IL-2, IL-6, IL-10, TNFa and IFNg which are an indicator for side effects on a clinical stage. For example, release of IL-6 is typically reduced upon use of a multitargeting bispecific antigen-binding molecule according to the present invention with respect to a corresponding monotargeting bispecific molecule. As it is known in the art, interleukin 6 (IL-6) seems to hold a key role in CRS pathophysiology since highly elevated IL-6 levels are seen in patients with CRS (Shimabukuro-Vornhagen et al. Journal for ImmunoTherapy of Cancer (2018) 6:56). As CRS is a serious side effect in immunotherapies, such reduction is an indication for less CRS in the clinical stage.

[0195] Further, the multitargeting bispecific antigen-binding molecules according to the present invention which bind to two (preferably different) targets on a target cell in order to show significant cytotoxic activity preferably do show less side effects than monotargeting bispecific antigen-binding molecules in terms of toxicity tissue damage. It has been a surprising finding that a multispecific molecule of the format as described herein shows higher tolerability, i.e. higher doses can be administered than corresponding monotargeting bispecific molecules without clinical finings such as tissue damage examined by histopathological examination. For example, a dose of 1.5 μg/kg of a MSLN monotargeting bispecific antigen-binding molecule (SEQ ID NO: 1183) was not tolerated and resulted in mortality whereas a dose of 0.1 μg/kg was tolerated. Conversely, a multitargeting CDH3-MSLN bispecific molecule (SEQ ID NO: 251) according to the present invention was tolerated at doses of up to 1000 μg/kg. Histopathological changes seen with the monotargeting molecule were generally more severe at doses of 1.5 μg/kg than those with the multitargeting molecule at 1000 μg/kg, respectively. Adhesions or irreversible fibrotic changes as induced by the monotargeting molecule were absent after treatment with the multitargeting molecule. Therefore, the tolerability of a multitargeting molecule according to the present invention is, e.g., 600 (histopathology) to, e.g., 10.000 (tolerated dose) times higher than for a corresponding monotargeting molecule despite equivalent in vitro potency against tumor cells. Hence, the multitargeting molecules of the present invention are particularly suitable in therapeutic settings, where targets are addressed which are significantly present not only on disease-associated (pathophysiological) but also or even predominately on physiological tissues which should, however, not be targeted by a cytotoxic immunotherapy. This is the case, e.g., for MSLN which is typically expressed in mesothelial cells which form the lining of several body cavities: the pleura (pleural cavity around the lungs), peritoneum (abdominopelvic cavity including the mesentery, omenta, falciform ligament and the perimetrium) and pericardium (around the heart). Addressing targets like MSLN by cytotoxic immunotherapy bears the risk of severe side effects such as intra-abdominal adhesions and/or fibrosis. Intra-abdominal adhesions are understood herein as pathologic scars formed between intra-abdominal organs. Adhesions can occur in the presence of intraperitoneal inflammation and cause peritoneal surfaces to adhere to each other. Adhesions can cause problems if the scarring limits the free movement of organs (Mutsaers S. E., Prele C. M. Pengelly, S., Herrick, S. E. Mesothelial cells and peritoneal homeostasis. Fertil Steril 2016, 106(5) 1018-1024). Fibrosis is understood herein as a common pathological outcome of several etiological conditions resulting in chronic tissue injury and is usually defined as an excessive deposition of extracellular matrix (ECM) components, leading with time to scar tissue formation and eventually organ dysfunction and failure (Maurizio Parola, Massimo Pinzani, Pathophysiology of Organ and Tissue Fibrosis, Molecular Aspects of Medicine 2019. (65) 1). Hence, the present invention also provides a method to address a disease-associated target being significantly co-expressed on a pathophysiological and one or more physiological tissues by providing a multitargeting bispecific antigen-binding molecule of the format described herein, wherein the molecule addresses (i.) the target expressed both on the disease-associated and the physiological tissue and (ii.) a further target which is disease associated but not expressed on the physiological tissue under (i.), wherein the method preferably avoids the formation of intra-abdominal adhesions and/or fibrosis where such target is MSLN.

[0196] It is envisaged that the bispecific antigen-binding molecules according to the present invention have cross-reactivity to, for example, cynomolgus monkey tumor-associated antigens such as CDH3, MSLN, CD20, CD22, FLT3, CLL1, and EpCAM. It is in particular envisaged in the context of the present invention that two targets can be addressed by one multitargeting bispecific antigen-binding molecule simultaneously.

[0197] Alternatively and besides the major advantage of increasing selectivity as described herein, dual targeting can mitigate lack of accessibility of one target when targeting the remaining target can trigger a sufficient residual effect. Examples are (i) the presence of soluble target which would “mask” the target on the target cell by binding the antigen-binding molecule without allowing the remaining molecule any therapeutic effect and (ii) antigen loss (lowering target expression on target cell) as the driving factor for tumor escape.

[0198] For example, a multitargeting antigen-binding molecule according to the present invention such as a construct directed against MSLN as TAA1 and CDH3 as TAA2 is suitable for use in the treatment, amelioration or prevention of cancer, in particular cancer selected from the group consisting of, lung carcinoma, head and neck carcinoma, a primary or secondary CNS tumor, a primary or secondary brain tumor, primary CNS lymphoma, spinal axis tumors, brain stem glioma, pituitary adenoma, adrenocortical cancer, esophagus carcinoma, colon cancer, breast cancer, ovarian cancer, NSCLC (non-small cell lung cancer), SCLC (small cell lung cancer), endometrial cancer, cervical cancer, uterine cancer, transitional cell carcinoma, bone cancer, pancreatic cancer, skin cancer, cutaneous or intraocular melanoma, hepatic cancer, biliary duct cancer, gall bladder cancer, kidney cancer, rectal cancer, cancer of the anal region, stomach cancer, gastrointestinal (gastric, colorectal, and duodenal) cancer, cancer of the small intestine, biliary tract cancer, cancer of the urethra, renal cell carcinoma, carcinoma of the endometrium, thyroid cancer, testicular cancer, cutaneous squamous cell cancer, melanoma, stomach cancer, prostate cancer, bladder cancer, osteosarcoma, mesothelioma, Hodgkin's Disease, non Hodgkins's lymphoma, chronic or acute leukemia, chronic myeloid leukemia, lymphocytic lymphomas, multiple myeloma, fibrosarcoma, neuroblastoma, retinoblastoma, and soft tissue sarcoma.

[0199] It is especially envisaged in the context of the present invention that a multitargeting antigen-binding molecule which preferably addresses two different target cell surface antigens thereby is very specific for its target cell and, therefore, preferably safe in its therapeutic use. Efficacy in terms of tumor growth inhibition has been demonstrated in vivo in a mouse model.

[0200] Preferred target cell surface antigens in the context of the present invention are, MSLN, CDH3, FLT3, CLL1, EpCAM, CD20, and CD22. Typically, target cell surface antigens in the context of the present invention are tumor associated antigens (TAA). B-lymphocyte antigen CD20 or CD20 is expressed on the surface of all B-cells beginning at the pro-B phase (CD45R+, CD117+) and progressively increasing in concentration until maturity. CD22, or cluster of differentiation-22, is a molecule belonging to the SIGLEC family of lectins. It is found on the surface of mature B cells and to a lesser extent on some immature B cells. Fms like tyrosine kinase 3 (FLT3) is also known as Cluster of differentiation antigen 135 (CD135), receptor-type tyrosine-protein kinase FLT3, or fetal liver kinase-2 (Flk2). FLT3 is a cytokine receptor which belongs to the receptor tyrosine kinase class III. CD135 is the receptor for the cytokine Flt3 ligand (FLT3L). The FLT3 gene is frequently mutated in acute myeloid leukemia (AML). C-type lectin-like receptor (CLL1), also known as CLEC12A, or as MICL. It contains an ITIM motif in cytoplasmic tail that can associate with signaling phosphatases SHP-1 and SHP-2. Human MICL is expressed as a monomer primarily on myeloid cells, including granulocytes, monocytes, macrophages and dendritic cells and is associated with AML. Mesothelin (MSLN) is a 40 kDa protein that is expressed in mesothelial cells and overexpressed in several human tumors. Cadherin-3 (CDH3), also known as P-Cadherin, is a calcium-dependent cell-cell adhesion glycoprotein composed of five extracellular cadherin repeats, a transmembrane region and a highly conserved cytoplasmic tail. It is associated with some types of tumors. Epithelial cell adhesion molecule (EpCAM) is a transmembrane glycoprotein mediating Ca2+-independent homotypic cell-cell adhesion in epithelia. EpCAM has oncogenic potential and appears to play a role in tumorigenesis and metastasis of carcinomas.

[0201] Further, it is envisaged as optionally but advantageously in the context of the present invention that the multitargeting antigen-binding molecule is provided with a spacer, preferably a globular protein structure such as a scFc domain, which also increases the molecule's half-life and enables intravenous dosing that is administrated only once every week, once every two weeks, once every three weeks or even once every four weeks, or less frequently.

[0202] In order to determine the epitope(s) of preferred multitargeting antigen-binding molecules according to the present invention directed, e.g. to the CDH3, MSLN or CD20 epitope, mapping was conducted as described herein. Preferred bispecific antigen-binding molecules having a target binder for CD20 are directed to all the of the epitope cluster E1A, E2B and E2C. An epitope cluster is understood herein as a stretch of amino acids (as disclosed herein and defined by their position according to the Kabat) within a target (as disclosed herein and defined by their position according to the Kabat) to which target a the whole the a target binder of a multitargeting bispecific antigen-binding molecule as described herein does essentially no longer bind, if said stretch of amino acid of the human target is replaced by a corresponding stretch of amino acids of the murine target. Therefore, said method of epitope clusters is understood herein as murine chimere sequence analysis. The method has been described, e.g. by Münz et al. Cancer Cell International 2010, 10:44 and was applied as described in detail in the examples with respect to CDH3 and MSLN.

[0203] The preferred epitope cluster is D4B for CDH3 as described herein and E1 for MSLN as described herein. As exemplified in the examples, selectivity gaps of multitargeting bispecific antigen-minding molecules of the present invention (with respect to comparable monotargeting bispecific antigen-binding molecules) are typically even larger and, hence, more preferably, if the MSLN target binder addresses the E1 epitope cluster and if the CDH3 target binder addresses the D4B epitope cluster. While addressing other epitope clusters also leads to surprisingly high selectivity gaps and the associated advantages in terms of efficacy and tolerability/safety, selectivity gaps are especially high and, thus preferred for molecules which comprise target binders which address E1 and D4B. Such molecules comprise, for example, a molecule with a MSLN target binder comprising CDR H1-H3 of SEQ ID NO 774 to 776 and CDR L1-L3 of 777 to 779 (and corresponding VH and VL of 780 and 781), CDR H1-H3 of SEQ ID NO 782 to 784 and CDR L1-L3 of 785 to 787 (and corresponding VH and VL of 788 and 789), CDR H1-H3 of SEQ ID NO 806 to 808 and CDR L1-L3 of 809 to 811 (and corresponding VH and VL of 812 and 813), CDR H1-H3 of SEQ ID NO 838 to 840 and CDR L1-L3 of 841 to 843 (and corresponding VH and VL of 844 and 845), CDR H1-H3 of SEQ ID NO 862 to 864 and CDR L1-L3 of 865 to 867 (and corresponding VH and VL of 868 and 869), CDR H1-H3 of SEQ ID NO 894 to 896 and CDR L1-L3 of 897 to 899 (and corresponding VH and VL of 900 and 901), CDR H1-H3 of SEQ ID NO 950 to 952 and CDR L1-L3 of 953 to 955 (and corresponding VH and VL of 956 and 957), CDR H1-H3 of SEQ ID NO 1030 to 1032 and CDR L1-L3 of 1033 to 1035 (and corresponding VH and VL of 1036 and 1037), or CDR H1-H3 of SEQ ID NO 86 to 88 and CDR L1-L3 of 89 to 91 (and corresponding VH of 92 and VL 93 or 94). A preferred example for a CDH3 binder binding to the preferred DB4 epitope cluster comprises CDR H1-H3 of SEQ ID NO 194, 432 and 196 and CDR L1-L3 of 197 to 199 (and corresponding VH and VL of 433 and 200). Further target binder which preferably bind to the preferred epitope cluster of D4B are, e.g., identified herein as CH3 15-E11 CC and CH3 24-D7 CC.

[0204] It is particular surprising that a multitargeting antigen-binding molecule according to the present invention is capable, to bind, preferably simultaneously to two different targets. Simultaneous binding has been demonstrated herein for several targets. However, this is surprising given the typically typical distance between the targets. For example, CD20 comprises two small extra cellular domains of only 6 aa and 47 aa. In contrast, CD22 comprises a 7 Ig domain long extracellular domain with 676 aa. However, despite the significantly different extracellular size and setup, a multitargeting antigen-binding molecule according to the present intention may successfully address both TAAs CD20 and CD22 at the same time for the benefit of increased efficacy and less toxicity.

[0205] An exemplary general arrangement of preferred “building blocks” of VH and VL of target and CD3 binder, respectively, as well as of preferred linkers and spacers as all disclosed herein, which together form the multitargeting bispecific antigen-binding molecule, can be summarized as follows:

[0206] It is envisaged in the context of the present invention, that preferred multitargeting antigen-binding molecules do not only show a favorable ratio of cytotoxicity to affinity, but additionally show sufficient stability characteristics in order to facilitate practical handling in formulating, storing and administrating said constructs. Sufficient stability is, for example, characterized by a high monomer content (i.e. non-aggregated and/or non-associated, native molecule) after standard preparation, such as at least 65% as determined by preparative size exclusion chromatography (SEC), more preferably at least 70% and even more preferably at least 75%. Also, the turbidity measured, e.g., at 340 nm as optical absorption at a concentration of 2.5 mg/ml should, preferably, be equal to or lower than 0.025, more preferably 0.020, e.g., in order to conclude to the essential absence of undesired aggregates. Advantageously, high monomer content is maintained after incubation in stress conditions such as freeze/thaw or incubation at 37 or 40° C. Even more, multitargeting antigen-binding molecules according to the present invention typically have a thermal stability which is at least comparable or even higher than that of bispecific antigen-binding molecules which have only one target binding domain but otherwise comprise a CD3 binding domain and, a half-life extending scFc domain, i.e. which are structurally less complex. The skilled person would expect that a more structurally complex protein-based molecule was less prone to thermal and other degradation, i.e. be less thermal stable. However, surprisingly the contrary is the case, a multitargeting bispecific antigen-binding molecule according to the present invention shows higher thermal stability, less monomer decrease after storage, higher monomer percentage after three freeze thaw cycles and higher protein homogeneity than a respective monotargeting bispecific antigen-binding molecule as disclosed herein.

[0207] In an embodiment, the present invention provides a multitargeting bispecific antigen-binding molecule comprising all four such domains. In a preferred embodiment, the domains under (i.), (ii.), (iii.) and (iv.) are arranged in an N to C orientation (squared format, see FIG. 1A). However, alternatively, the multitargeting bispecific antigen-binding molecule may have the domains arranged in the order (i), (ii.), (iv) and (iii.) (mirror format, sec FIG. 1B), or (ii.), (i.), (iii.) and (iv.) or (ii.), (i.), (iv) and (iii.) in an N to C orientation. Surprisingly, all arrangements which (a.) either separate the target and the effector binder of any of the two bispecific entities or (b.) bring the two bispecific entities as such too close together will lead to constructs which show reduced ability for avidity effects in terms of a preferred selectivity gap as described herein between mono and dual positive target cells (sec FIGS. 1C to F and K and L (the latter in “V” and “A” shape)).

[0208] The term “polypeptide” is understood herein as an organic polymer which comprises at least one continuous, unbranched amino acid chain. In the context of the present invention, a polypeptide comprising more than one amino acid chain is likewise envisaged. An amino acid chain of a polypeptide typically comprises at least 50 amino acids, preferably at least 100, 200, 300, 400 or 500 amino acids. It is also envisaged in the context of the present invention that an amino acid chain of a polymer is linked to an entity which is not composed of amino acids.

[0209] The term “antigen-binding polypeptide” according to the present invention is preferably a polypeptide which immuno-specifically binds to its target or antigen. It typically comprises the heavy chain variable region (VH) and/or the light chain variable region (VL) of an antibody, or comprises domains derived therefrom. A polypeptide according to the invention comprises the minimum structural requirements of an antibody which allow for immuno-specific target binding. This minimum requirement may e.g. be defined by the presence of at least three light chain CDRs (i.e. CDR1, CDR2 and CDR3 of the VL region) and/or three heavy chain CDRs (i.e. CDR1, CDR2 and CDR3 of the VH region), preferably of all six CDRs. An antigen-binding molecule of the present invention is preferably a T-cell engaging polypeptide which may hence be characterized by the presence of three or six CDRs in either one or both binding domains, and the skilled person knows where (in which order) those CDRs are located within the binding domain. Preferably, an “antigen-binding molecule” is understood as an “antigen-binding polypeptide” in the context of the present invention. In an alternative embodiment, an antigen-binding polypeptide of the present invention may be an aptamer.

[0210] Alternatively, a molecule in the context of the present invention, is an antigen-binding polypeptide which corresponds to an “antibody construct” which typically refers to a molecule in which the structure and/or function is/are based on the structure and/or function of an antibody, e.g., of a full-length or whole immunoglobulin molecule. An antigen-binding molecule is hence capable of binding to its specific target or antigen and/or is/are drawn from the variable heavy chain (VH) and/or variable light chain (VL) domains of an antibody or fragment thereof. Furthermore, the domain which binds to its binding partner according to the present invention is understood herein as a binding domain of an antigen-binding molecule according to the invention. Typically, a binding domain according to the present invention comprises the minimum structural requirements of an antibody which allow for the target binding. This minimum requirement may e.g. be defined by the presence of at least the three light chain CDRs (i.e. CDR1, CDR2 and CDR3 of the VL region) and/or the three heavy chain CDRs (i.e. CDR1, CDR2 and CDR3 of the VH region), preferably of all six CDRs. An alternative approach to define the minimal structure requirements of an antibody is the definition of the epitope of the antibody within the structure of the specific target, respectively, the protein domain of the target protein composing the epitope region (epitope cluster) or by reference to a specific antibody competing with the epitope of the defined antibody. The antibodies on which the constructs according to the invention are based include for example monoclonal, recombinant, chimeric, deimmunized, humanized and human antibodies.

[0211] In the context of the present invention, a polypeptide of the present invention binds to its respective target structure in a particular manner. Preferably, a polypeptide according to the present invention comprises one paratope per binding domain which specifically or immuno-specifically binds to”, “(specifically or immuno-specifically) recognizes”, or “(specifically or immuno-specifically) reacts with” its respective target structure. This means in accordance with this invention that a polypeptide or a binding domain thereof interacts or (immuno-)specifically interacts with a given epitope on the target molecule (antigen) and CD3, respectively. This interaction or association occurs more frequently, more rapidly, with greater duration, with greater affinity, or with some combination of these parameters, to an epitope on the specific target than to alternative substances (non-target molecules). Because of the sequence similarity between homologous proteins in different species, a binding domain that (immuno-) specifically binds to its target (such as a human target) may, however, cross-react with homologous target molecules from different species (such as, from non-human primates). The term “specific/immuno-specific binding” can hence include the binding of a binding domain to epitopes and/or structurally related epitopes in more than one species. The term “(immuno-) selectively binds” does exclude the binding to structurally related epitopes.

[0212] The binding domain of an antigen-binding molecule according to the invention may e.g. comprise the above referred groups of CDRs. Preferably, those CDRs are comprised in the framework of an antibody light chain variable region (VL) and an antibody heavy chain variable region (VH); however, it does not have to comprise both. Fd fragments, for example, have two VH regions and often retain some antigen-binding function of the intact antigen-binding domain. Additional examples for the format of antibody fragments, antibody variants or binding domains include (1) a Fab fragment, a monovalent fragment having the VL. VH, CL and CH1 domains; (2) a F(ab′)2 fragment, a bivalent fragment having two Fab fragments linked by a disulfide bridge at the hinge region; (3) an Fd fragment having the two VH and CH1 domains; (4) an Fv fragment having the VL and VH domains of a single arm of an antibody, (5) a dAb fragment (Ward et al., (1989) Nature 341:544-546), which has a VH domain; (6) an isolated complementarity determining region (CDR), and (7) a single chain Fv (scFv), the latter being preferred (for example, derived from an scFV-library). Examples for embodiments of antigen-binding molecules according to the invention are e.g. described in WO 00/006605, WO 2005/040220, WO 2008/119567, WO 2010/037838, WO 2013/026837, WO 2013/026833, US 2014/0308285, US 2014/0302037, WO 2014/144722. WO 2014/151910, and WO 2015/048272.

[0213] Also, within the definition of “binding domain” or “domain which binds” are fragments of full-length antibodies, such as VH, VHH, VL, (s)dAb, Fv, Fd, Fab, Fab′, F(ab′)2 or “r IgG” (“half antibody”). Antigen-binding molecules according to the invention may also comprise modified fragments of antibodies, also called antibody variants, such as scFv, di-scFv or bi(s)-scFv, scFv-Fc, scFv-zipper, scFab, Fab2, Fab3, diabodies, single chain diabodies, tandem diabodies (Tandab's), tandem di-scFv, tandem tri-scFv, “multibodies” such as triabodies or tetrabodies, and single domain antibodies such as nanobodies or single variable domain antibodies comprising merely one variable domain, which may be VHH, VH or VL, that specifically bind an antigen or epitope independently of other V regions or domains. Typically, a binding domain of the present invention comprises a paratope which facilitates the binding to its binding partner.

[0214] As used herein, the terms “single-chain Fv.” “single-chain antibodies” or “scFv” refer to single polypeptide chain antibody fragments that comprise the variable regions from both the heavy and light chains, but lack the constant regions. Generally, a single-chain antibody further comprises a polypeptide linker between the VH and VL domains which enables it to form the desired structure which would allow for antigen binding. Single chain antibodies are discussed in detail by Pluckthun in The Pharmacology of Monoclonal Antibodies, vol. 113, Rosenburg and Moore eds. Springer-Verlag, New York, pp. 269-315 (1994). Various methods of generating single chain antibodies are known, including those described in U.S. Pat. Nos. 4,694,778 and 5,260,203; International Patent Application Publication No. WO 88/01649; Bird (1988) Science 242:423-442; Huston et al. (1988) Proc. Natl. Acad. Sci. USA 85:5879-5883; Ward et al. (1989) Nature 334:54454; Skerra et al. (1988) Science 242:1038-1041. In specific embodiments, single-chain antibodies can also be bispecific, multispecific, human, and/or humanized and/or synthetic.

[0215] In the context of the present invention, a paratope is understood as an antigen-binding site which is a part of a polypeptide as described herein and which recognizes and binds to an antigen. A paratope is typically a small region of about at least 5 amino acids. A paratope as understood herein typically comprises parts of antibody-derived heavy (VH) and light chain (VL) sequences. Each binding domain of a molecule according to the present invention is provided with a paratope comprising a set of 6 complementarity-determining regions (CDR loops) with three of each being comprised within the antibody-derived VH and VL sequence, respectively.

[0216] Furthermore, the definition of the term “antigen-binding molecule” includes preferably polyvalent/multivalent constructs and, thus, bispecific molecules, wherein bispecific means that they specifically bind to two cell types comprising distinctive antigenic structures, i.e. target cell(s) and effector cell(s). As the antigen-binding molecules of the present invention are preferably multitargeting, they are typically as well as polyvalent/multivalent molecules, i.e. they specifically bind more than two antigenic structures, preferably four distinct binding domains in the context of the present invention which are two target binding domains and two CD3 binding domains. The term “multitargeting bispecific antigen-binding molecule” comprises the terms “multitargeting bispecific T-cell engager molecule” and “multitargeting bispecific T-cell engager polypeptide (MBiTEP)”. A preferred “multitargeting bispecific antigen-binding molecule” is a “multitargeting bispecific T-cell engager molecule” or a “multitargeting bispecific T-cell engager polypeptide (MBiTEP)”. The term multitargeting bispecific T-cell engager molecule” is understood to comprise the term “multitargeting bispecific T-cell engager polypeptide. Moreover, the definition of the term “antigen-binding molecule” includes molecules comprising only one polypeptide chain as well as molecules consisting of more than one polypeptide chain, which chains can be either identical (homodimers, homotrimers or homo oligomers) or different (heterodimer, heterotrimer or heterooligomer). Such molecules comprising more than one polypeptide chain, i.e. typically two chains, have these chains typically attached to each other as heterodimers via charged pair binding, e.g. within a heteroFc entity which serves as a spacer and half-life extending moiety in between the two bispecific entities as described herein. Examples for the above identified antigen-binding molecules, e.g. antibody-based molecules and variants or derivatives thereof are described inter alia in Harlow and Lane, Antibodies a laboratory manual, CSHL Press (1988) and Using Antibodies: a laboratory manual, CSHL Press (1999), Kontermann and Dubel, Antibody Engineering, Springer, 2nd ed. 2010 and Little, Recombinant Antibodies for Immunotherapy, Cambridge University Press 2009.

[0217] The term “bispecific” as used herein refers to an antigen-binding molecule which is “at least bispecific”, i.e., it addresses two different cell types, i.e. target and effector cells, and comprises at least a first and third binding domain and a second and fourth binding domain, wherein at least two binding domains bind to two antigens or targets selected preferably from CD20, CD22, FLT3, MSLN, CDH3, CLL1 and EpCAM, and the other two binding domains of the same molecule bind to another antigen (here: CD3) on an effector cell, typically on a T cell. Accordingly, antigen-binding molecules according to the invention comprise specificities for at least two different antigens or targets. For example, two domains do preferably not bind to an extracellular epitope of CD3e of one or more of the species as described herein.

[0218] The term “target cell surface antigen” refers to an antigenic structure expressed by a cell and which is present at the cell surface such that it is accessible for an antigen-binding molecule as described herein. A preferred target cell surface antigen in the context of the present invention is a tumor associated antigen (TAA). It may be a protein, preferably the extracellular portion of a protein, or a carbohydrate structure, preferably a carbohydrate structure of a protein, such as a glycoprotein. It is preferably a tumor antigen. The term “bispecific antigen-binding molecule” of the invention also encompasses bispecific multitargeting antigen-binding molecules such as tritargeting antigen-binding molecules, the latter ones including three binding domains, or constructs having more than three (e.g. four, five . . . ) specificities.

[0219] Preferred in the context of the present invention is a molecule which is “multitargeting”, which is understood herein to be “at least targeting two targets (e.g. TAAs) per molecule of the invention typically per target cell”. In this regard, a multitargeting molecule such as an antigen-binding molecule is specific for two—typically identical—effector structures on an effector cell such as CD3, more preferably CD3epsilon (CD3e, which is comprised whenever reference is made to the “CD3” in the present invention), and at least two target cell surface antigens. Said specificity is conferred by respective binding domains as defined herein. Typically, “multitargeting” refers to a molecule which is specific for at least two (preferably different) target cell surface antigens (e.g. TAAs) which confers preferred properties of a multitargeting antigen-binding molecule according to the present invention, namely mitigation of antigen loss and increase of selectivity, i.e. selectivity for killing target cells which co-express the targets for which the molecule of the invention has binding domains and which target cells are associated with a disease. Thereby, the therapeutic window of the molecule of the invention is increased with respect to monotargeting bispecific molecules which typically leads to higher drug tolerability as demonstrated herein.

[0220] A T-cell engaging antigen-binding molecule, e.g. a single chain polypeptide, according to the present invention is preferably bispecific which is understood herein to typically comprise one domain binding to at least one target antigen and another domain binding to CD3. Hence, it does not occur naturally, and it is markedly different in its function from naturally occurring products. A polypeptide in accordance with the invention is hence an artificial “hybrid” polypeptide comprising at least two distinct binding domains with different specificities and is, thus, bispecific. Bispecific antigen-binding molecules can be produced by a variety of methods including fusion of hybridomas or linking of Fab′ fragments. See, e.g., Songsivilai & Lachmann, Clin. Exp. Immunol. 79:315-321 (1990).

[0221] The at least four binding domains and the variable domains (VH/VL) of the antigen-binding molecule of the present invention typically comprise peptide linkers (spacer peptides). The term “peptide linker” comprises in accordance with the present invention an amino acid sequence by which the amino acid sequences of one (variable and/or binding) domain and another (variable and/or binding) domain of the antigen-binding molecule of the invention are linked with each other. The peptide linker between the first and the second binding domain and the third and the fourth domain, wherein the first and the third domain are preferably capable to bind simultaneously to two targets, which are preferably different targets (e.g. TAA1 and TAA2) preferably on the same cell, are preferably flexible and of limited length, e.g. of 5, 6, 7, 8, 9, 10, 11, 12, 13, 14, 15, 16, 17 or 18 amino acids. The peptide linkers can also be used to fuse the spacer to the other domains of the antigen-binding molecule of the invention. An essential technical feature of such peptide linker is that it does not comprise any polymerization activity. Among the suitable peptide linkers are those described in U.S. Pat. Nos. 4,751,180 and 4,935,233 or WO 88/09344. The peptide linkers can also be used to attach other domains or modules or regions (such as half-life extending domains) to the antigen-binding molecule of the invention. However, typically the linker between the first and the second target binding domain differs from the intra-binder linker which links the VH and VL within the target binding domain. Said difference is the linker between the first and the second binding domain having one amino acid more than intra-binder linkers, e.g. six and five amino acids, respectively, such as SGGGGS versus GGGGS. This confers surprisingly flexibility and stability at the same time in the specific antigen-binding molecule format as described herein. The spacer (or synonymously spacer entity) between the two bispecific entities as described herein is a specific embodiment of a linker because a spacer also functions as a linker because it contributes to linking the two bispecific entities to preferably build at least one continuous polypeptide chain comprising the four binding domains or parts thereof. However, in addition, the spacer functions as an entity which spaces the two bispecific entities sterically apart. Accordingly, a spacer in the context of the present invention is a specific embodiment of a linker which—together with two further short and flexible linkers on each end—contributes to linking the two binding domains (of two different bispecific entities) but first and foremost spaces them apart in such a way that the two bispecific entities can advantageously act as described herein, e.g. show a surprisingly high selectivity gap.

[0222] The antigen-binding molecules of the present invention are preferably “in vitro generated antigen-binding molecules”. This term refers to an antigen-binding molecule according to the above definition where all or part of the variable region (e.g., at least one CDR) is generated in a non-immune cell selection, e.g., an in vitro phage display, protein chip or any other method in which candidate sequences can be tested for their ability to bind to an antigen. This term thus preferably excludes sequences generated solely by genomic rearrangement in an immune cell in an animal. A “recombinant antibody” is an antibody made through the use of recombinant DNA technology or genetic engineering.

[0223] The term “monoclonal antibody” (mAb) or monoclonal antibody from which an antigen-binding molecule as used herein is derived refers to an antibody obtained from a population of substantially homogeneous antibodies, i.e., the individual antibodies comprising the population are identical except for possible naturally occurring mutations and/or post-translation modifications (e.g., isomerizations, amidations) that may be present in minor amounts. Monoclonal antibodies are highly specific, being directed against a single antigenic side or determinant on the antigen, in contrast to conventional (polyclonal) antibody preparations which typically include different antibodies directed against different determinants (or epitopes). In addition to their specificity, the monoclonal antibodies are advantageous in that they are synthesized by the hybridoma culture, hence uncontaminated by other immunoglobulins. The modifier “monoclonal” indicates the character of the antibody as being obtained from a substantially homogeneous population of antibodies, and is not to be construed as requiring production of the antibody by any particular method.

[0224] For the preparation of monoclonal antibodies, any technique providing antibodies produced by continuous cell line cultures can be used. For example, monoclonal antibodies to be used may be made by the hybridoma method first described by Koehler et al., Nature, 256: 495 (1975), or may be made by recombinant DNA methods (see, e.g., U.S. Pat. No. 4,816,567). Examples for further techniques to produce human monoclonal antibodies include the trioma technique, the human B-cell hybridoma technique (Kozbor, Immunology Today 4 (1983), 72) and the EBV-hybridoma technique (Cole et al., Monoclonal Antibodies and Cancer Therapy, Alan R. Liss, Inc. (1985), 77-96).

[0225] Hybridomas can then be screened using standard methods, such as enzyme-linked immunosorbent assay (ELISA) and surface plasmon resonance analysis, e.g. Biacore™ to identify one or more hybridomas that produce an antibody that specifically binds with a specified antigen. Any form of the relevant antigen may be used as the immunogen, e.g., recombinant antigen, naturally occurring forms, any variants or fragments thereof, as well as an antigenic peptide thereof. Surface plasmon resonance as employed in the Biacore system can be used to increase the efficiency of phage antibodies which bind to an epitope of a target cell surface antigen (Schier, Human Antibodies Hybridomas 7 (1996), 97-105; Malmborg, J. Immunol. Methods 183 (1995), 7-13).

[0226] Another exemplary method of making monoclonal antibodies includes screening protein expression libraries, e.g., phage display or ribosome display libraries. Phage display is described, for example, in Ladner et al., U.S. Pat. No. 5,223,409; Smith (1985) Science 228:1315-1317, Clackson et al., Nature, 352: 624-628 (1991) and Marks et al., J. Mol. Biol., 222: 581-597 (1991).

[0227] In addition to the use of display libraries, the relevant antigen can be used to immunize a non-human animal, e.g., a rodent (such as a mouse, hamster, rabbit or rat). In one embodiment, the non-human animal includes at least a part of a human immunoglobulin gene. For example, it is possible to engineer mouse strains deficient in mouse antibody production with large fragments of the human Ig (immunoglobulin) loci. Using the hybridoma technology, antigen-specific monoclonal antibodies derived from the genes with the desired specificity may be produced and selected. See, e.g., XENOMOUSE™, Green et al. (1994) Nature Genetics 7:13-21, US 2003-0070185, WO 96/34096, and WO 96/33735.

[0228] A monoclonal antibody can also be obtained from a non-human animal, and then modified. e.g., humanized, deimmunized, rendered chimeric etc., using recombinant DNA techniques known in the art. Examples of modified antigen-binding molecules include humanized variants of non-human antibodies, “affinity matured” antibodies (sec, e.g. Hawkins et al. J. Mol. Biol. 254, 889-896 (1992) and Lowman et al., Biochemistry 30, 10832-10837 (1991)) and antibody mutants with altered effector function(s) (see, e.g., U.S. Pat. No. 5,648,260, Kontermann and Dübel (2010), loc. cit. and Little (2009), loc. cit.).

[0229] In immunology, affinity maturation is the process by which B cells produce antibodies with increased affinity for antigen during the course of an immune response. With repeated exposures to the same antigen, a host will produce antibodies of successively greater affinities. Like the natural prototype, the in vitro affinity maturation is based on the principles of mutation and selection. The in vitro affinity maturation has successfully been used to optimize antibodies, antigen-binding molecules, and antibody fragments. Random mutations inside the CDRs are introduced using radiation, chemical mutagens or error-prone PCR. In addition, the genetic diversity can be increased by chain shuffling. Two or three rounds of mutation and selection using display methods like phage display usually results in antibody fragments with affinities in the low nanomolar range.

[0230] A preferred type of an amino acid substitutional variation of the antigen-binding molecules involves substituting one or more hypervariable region residues of a parent antibody (e. g. a humanized or human antibody). Generally, the resulting variant(s) selected for further development will have improved biological properties relative to the parent antibody from which they are generated. A convenient way for generating such substitutional variants involves affinity maturation using phage display. Briefly, several hypervariable region sides (e. g. 6-7 sides) are mutated to generate all possible amino acid substitutions at each side. The antibody variants thus generated are displayed in a monovalent fashion from filamentous phage particles as fusions to the gene III product of M13 packaged within each particle. The phage-displayed variants are then screened for their biological activity (e. g. binding affinity) as herein disclosed. In order to identify candidate hypervariable region sides for modification, alanine scanning mutagenesis can be performed to identify hypervariable region residues contributing significantly to antigen binding. Alternatively, or additionally, it may be beneficial to analyze a crystal structure of the antigen-antibody complex to identify contact points between the binding domain and, e.g., human CS1, BCMA, CD20, CD22. FLT3, CD123, CDH3, MSLN, CLL1 or EpCAM. Such contact residues and neighbouring residues are candidates for substitution according to the techniques elaborated herein. Once such variants are generated, the panel of variants is subjected to screening as described herein and antibodies with superior properties in one or more relevant assays may be selected for further development.

[0231] The monoclonal antibodies and antigen-binding molecules of the present invention specifically include “chimeric” antibodies (immunoglobulins) in which a portion of the heavy and/or light chain is identical with or homologous to corresponding sequences in antibodies derived from a particular species or belonging to a particular antibody class or subclass, while the remainder of the chain(s) is/are identical with or homologous to corresponding sequences in antibodies derived from another species or belonging to another antibody class or subclass, as well as fragments of such antibodies, so long as they exhibit the desired biological activity (U.S. Pat. No. 4,816,567; Morrison et al., Proc. Natl. Acad. Sci. USA, 81: 6851-6855 (1984)). Chimeric antibodies of interest herein include “primitized” antibodies comprising variable domain antigen-binding sequences derived from a non-human primate (e.g., Old World Monkey, Ape etc.) and human constant region sequences. A variety of approaches for making chimeric antibodies have been described. Sec e.g., Morrison et al., Proc. Natl. Acad. ScL U.S.A. 81:6851, 1985; Takeda et al., Nature 314:452, 1985, Cabilly et al., U.S. Pat. No. 4,816,567; Boss et al., U.S. Pat. No. 4,816,397; Tanaguchi et al., EP 0171496; EP 0173494; and GB 2177096.

[0232] An antibody, antigen-binding molecule, antibody fragment or antibody variant may also be modified by specific deletion of human T cell epitopes (a method called “deimmunization”) by the methods disclosed for example in WO 98/52976 or WO 00/34317. Briefly, the heavy and light chain variable domains of an antibody can be analyzed for peptides that bind to MHC class II; these peptides represent potential T cell epitopes (as defined in WO 98/52976 and WO 00/34317). For detection of potential T cell epitopes, a computer modeling approach termed “peptide threading” can be applied, and in addition a database of human MHC class II binding peptides can be searched for motifs present in the VH and VL sequences, as described in WO 98/52976 and WO 00/34317. These motifs bind to any of the 18 major MHC class II DR allotypes, and thus constitute potential T cell epitopes. Potential T cell epitopes detected can be eliminated by substituting small numbers of amino acid residues in the variable domains, or preferably, by single amino acid substitutions. Typically, conservative substitutions are made. Often, but not exclusively, an amino acid common to a position in human germline antibody sequences may be used. Human germline sequences are disclosed e.g. in Tomlinson, et al. (1992) J. Mol. Biol. 227:776-798; Cook, G. P. et al. (1995) Immunol. Today Vol. 16 (5): 237-242; and Tomlinson et al. (1995) EMBO J. 14: 14:4628-4638. The V BASE directory provides a comprehensive directory of human immunoglobulin variable region sequences (compiled by Tomlinson, L A. et al. MRC Centre for Protein Engineering, Cambridge, UK). These sequences can be used as a source of human sequence, e.g., for framework regions and CDRs. Consensus human framework regions can also be used, for example as described in U.S. Pat. No. 6,300,064.

[0233] “Humanized” antibodies, antigen-binding molecules, variants or fragments thereof (such as Fv, Fab, Fab′, F(ab′)2 or other antigen-binding subsequences of antibodies) are antibodies or immunoglobulins of mostly human sequences, which contain (a) minimal sequence(s) derived from non-human immunoglobulin. For the most part, humanized antibodies are human immunoglobulins (recipient antibody) in which residues from a hypervariable region (also CDR) of the recipient are replaced by residues from a hypervariable region of a non-human (e.g., rodent) species (donor antibody) such as mouse, rat, hamster or rabbit having the desired specificity, affinity, and capacity. In some instances, Fv framework region (FR) residues of the human immunoglobulin are replaced by corresponding non-human residues. Furthermore, “humanized antibodies” as used herein may also comprise residues which are found neither in the recipient antibody nor the donor antibody. These modifications are made to further refine and optimize antibody performance. The humanized antibody may also comprise at least a portion of an immunoglobulin constant region (Fc), typically that of a human immunoglobulin. For further details, see Jones et al., Nature, 321: 522-525 (1986); Reichmann et al., Nature, 332: 323-329 (1988); and Presta, Curr. Op. Struct. Biol., 2: 593-596 (1992).

[0234] Humanized antibodies or fragments thereof can be generated by replacing sequences of the Fv variable domain that are not directly involved in antigen binding with equivalent sequences from human Fv variable domains. Exemplary methods for generating humanized antibodies or fragments thereof are provided by Morrison (1985) Science 229:1202-1207; by Oi et al. (1986) BioTechniques 4:214; and by U.S. Pat. Nos. 5,585,089; 5,693,761; 5,693,762; 5,859,205; and 6,407,213. Those methods include isolating, manipulating, and expressing the nucleic acid sequences that encode all or part of immunoglobulin Fv variable domains from at least one of a heavy or light chain. Such nucleic acids may be obtained from a hybridoma producing an antibody against a predetermined target, as described above, as well as from other sources. The recombinant DNA encoding the humanized antibody molecule can then be cloned into an appropriate expression vector.

[0235] Humanized antibodies may also be produced using transgenic animals such as mice that express human heavy and light chain genes, but are incapable of expressing the endogenous mouse immunoglobulin heavy and light chain genes. Winter describes an exemplary CDR grafting method that may be used to prepare the humanized antibodies described herein (U.S. Pat. No. 5,225,539). All of the CDRs of a particular human antibody may be replaced with at least a portion of a non-human CDR, or only some of the CDRs may be replaced with non-human CDRs. It is only necessary to replace the number of CDRs required for binding of the humanized antibody to a predetermined antigen.

[0236] A humanized antibody can be optimized by the introduction of conservative substitutions, consensus sequence substitutions, germline substitutions and/or back mutations. Such altered immunoglobulin molecules can be made by any of several techniques known in the art. (e.g., Teng et al., Proc. Natl. Acad. Sci. U.S.A., 80: 7308-7312, 1983; Kozbor et al., Immunology Today, 4: 7279, 1983; Olsson et al., Meth. Enzymol., 92: 3-16, 1982, and EP 239 400).

[0237] The term “human antibody”, “human antigen-binding molecule” and “human binding domain” includes antibodies, antigen-binding molecules and binding domains having antibody regions such as variable and constant regions or domains which correspond substantially to human germline immunoglobulin sequences known in the art, including, for example, those described by Kabat et al. (1991) (loc. cit.). The human antibodies, antigen-binding molecules or binding domains of the invention may include amino acid residues not encoded by human germline immunoglobulin sequences (e.g., mutations introduced by random or side-specific mutagenesis in vitro or by somatic mutation in vivo), for example in the CDRs, and in particular, in CDR3. The human antibodies, antigen-binding molecules or binding domains can have at least one, two, three, four, five, or more positions replaced with an amino acid residue that is not encoded by the human germline immunoglobulin sequence. The definition of human antibodies, antigen-binding molecules and binding domains as used herein also contemplates fully human antibodies, which include only non-artificially and/or genetically altered human sequences of antibodies as those can be derived by using technologies or systems such as the Xenomouse. Preferably, a “fully human antibody” does not include amino acid residues not encoded by human germline immunoglobulin sequences.

[0238] In some embodiments, the antigen-binding molecules of the invention are “isolated” or “substantially pure” antigen-binding molecules. “Isolated” or “substantially pure”, when used to describe the antigen-binding molecules disclosed herein, means an antigen-binding molecule that has been identified, separated and/or recovered from a component of its production environment. Preferably, the antigen-binding molecule is free or substantially free of association with all other components from its production environment. Contaminant components of its production environment, such as that resulting from recombinant transfected cells, are materials that would typically interfere with diagnostic or therapeutic uses for the polypeptide, and may include enzymes, hormones, and other proteinaceous or non-proteinaceous solutes. The antigen-binding molecules may e.g. constitute at least about 5%, or at least about 50% by weight of the total protein in a given sample. It is understood that the isolated protein may constitute from 5% to 99.9% by weight of the total protein content, depending on the circumstances. The polypeptide may be made at a significantly higher concentration through the use of an inducible promoter or high expression promoter, such that it is made at increased concentration levels. The definition includes the production of an antigen-binding molecule in a wide variety of organisms and/or host cells that are known in the art. In preferred embodiments, the antigen-binding molecule will be purified (1) to a degree sufficient to obtain at least 15 residues of N-terminal or internal amino acid sequence by use of a spinning cup sequenator, or (2) to homogeneity by SDS-PAGE under non-reducing or reducing conditions using Coomassie blue or, preferably, silver stain. Ordinarily, however, an isolated antigen-binding molecule will be prepared by at least one purification step.

[0239] The term “binding domain” characterizes in connection with the present invention a domain which (specifically) binds to/interacts with/recognizes a given target epitope or a given target side on the target molecules (antigens), e.g. CS1, BCMA, CD20, CD22, FLT3, CD123, CLL1, MSLN, or EpCAM, and CD3, respectively. The structure and function of the typically first and third or second and fourth binding domain (recognizing e.g. CS1, BCMA, CD20, CD22, FLT3, CD123, CLL1, MSLN, or EpCAM), and preferably also the structure and/or function of the effector binding domain (typically the second and fourth or first and third binding domain recognizing CD3), is/are based on the structure and/or function of an antibody, e.g. of a full-length or whole immunoglobulin molecule, and/or is/are drawn from the variable heavy chain (VH) and/or variable light chain (VL) domains of an antibody or fragment thereof. Preferably the target cell surface antigen(s) binding domain(s) is/are characterized by the presence of three light chain CDRs (i.e. CDR1, CDR2 and CDR3 of the VL region) and/or three heavy chain CDRs (i.e. CDR1, CDR2 and CDR3 of the VH region). The effector (typically CD3) binding domain preferably also comprises the minimum structural requirements of an antibody which allow for the target binding. More preferably, the second binding domain comprises at least three light chain CDRs (i.e. CDR1, CDR2 and CDR3 of the VL region) and/or three heavy chain CDRs (i.e. CDR1, CDR2 and CDR3 of the VH region). It is envisaged that the first and/or second binding domain is produced by or obtainable by phage-display or library screening methods rather than by grafting CDR sequences from a pre-existing (monoclonal) antibody into a scaffold.

[0240] According to the present invention, binding domains are in the form of one or more polypeptides. Such polypeptides may include proteinaceous parts and non-proteinaceous parts (e.g. chemical linkers or chemical cross-linking agents such as glutaraldehyde). Proteins (including fragments thereof, preferably biologically active fragments, and peptides, usually having less than 30 amino acids) comprise two or more amino acids coupled to each other via a covalent peptide bond (resulting in a chain of amino acids).

[0241] The term “polypeptide” as used herein describes a group of molecules, which usually consist of more than 30 amino acids. Polypeptides may further form multimers such as dimers, trimers and higher oligomers, i.e., consisting of more than one polypeptide molecule. Polypeptide molecules forming such dimers, trimers etc. may be identical or non-identical. The corresponding higher order structures of such multimers are, consequently, termed homo- or heterodimers, homo- or heterotrimers etc. An example for a heteromultimer is an antibody molecule, which, in its naturally occurring form, consists of two identical light polypeptide chains and two identical heavy polypeptide chains. The terms “peptide”. “polypeptide” and “protein” also refer to naturally modified peptides/polypeptides/proteins wherein the modification is effected e.g. by post-translational modifications like glycosylation, acetylation, phosphorylation and the like. A “peptide”, “polypeptide” or “protein” when referred to herein may also be chemically modified such as pegylated. Such modifications are well known in the art and described herein below.

[0242] Preferably the binding domains which binds to any of CS1, BCMA, CD20, CD22, FLT3, CD123, CLL1, CDH3, MSLN, and EpCAM, and/or the binding domains which binds to CD3ε is/are human binding domains. Antibodies and antigen-binding molecules comprising at least one human binding domain avoid some of the problems associated with antibodies or antigen-binding molecules that possess non-human such as rodent (e.g. murine, rat, hamster or rabbit) variable and/or constant regions. The presence of such rodent derived proteins can lead to the rapid clearance of the antibodies or antigen-binding molecules or can lead to the generation of an immune response against the antibody or antigen-binding molecule by a patient. In order to avoid the use of rodent derived antibodies or antigen-binding molecules, human or fully human antibodies/antigen-binding molecules can be generated through the introduction of human antibody function into a rodent so that the rodent produces fully human antibodies.

[0243] The ability to clone and reconstruct megabase-sized human loci in yeast artificial chromosomes YACs and to introduce them into the mouse germline provides a powerful approach to elucidating the functional components of very large or crudely mapped loci as well as generating useful models of human disease. Furthermore, the use of such technology for substitution of mouse loci with their human equivalents could provide unique insights into the expression and regulation of human gene products during development, their communication with other systems, and their involvement in disease induction and progression.

[0244] An important practical application of such a strategy is the “humanization” of the mouse humoral immune system. Introduction of human immunoglobulin (Ig) loci into mice in which the endogenous Ig genes have been inactivated offers the opportunity to study the mechanisms underlying programmed expression and assembly of antibodies as well as their role in B-cell development. Furthermore, such a strategy could provide an ideal source for production of fully human monoclonal antibodies (mAbs)—an important milestone towards fulfilling the promise of antibody therapy in human disease. Fully human antibodies or antigen-binding molecules are expected to minimize the immunogenic and allergic responses intrinsic to mouse or mouse-derivatized mAbs and thus to increase the efficacy and safety of the administered antibodies/antigen-binding molecules. The use of fully human antibodies or antigen-binding molecules can be expected to provide a substantial advantage in the treatment of chronic and recurring human diseases, such as inflammation, autoimmunity, and cancer, which require repeated compound administrations.

[0245] One approach towards this goal was to engineer mouse strains deficient in mouse antibody production with large fragments of the human Ig loci in anticipation that such mice would produce a large repertoire of human antibodies in the absence of mouse antibodies. Large human Ig fragments would preserve the large variable gene diversity as well as the proper regulation of antibody production and expression. By exploiting the mouse machinery for antibody diversification and selection and the lack of immunological tolerance to human proteins, the reproduced human antibody repertoire in these mouse strains should yield high affinity antibodies against any antigen of interest, including human antigens. Using the hybridoma technology, antigen-specific human mAbs with the desired specificity could be readily produced and selected. This general strategy was demonstrated in connection with the generation of the first XenoMouse mouse strains (see Green et al. Nature Genetics 7:13-21 (1994)). The XenoMouse strains were engineered with YACs containing 245 kb and 190 kb-sized germline configuration fragments of the human heavy chain locus and kappa light chain locus, respectively, which contained core variable and constant region sequences. The human Ig containing YACs proved to be compatible with the mouse system for both rearrangement and expression of antibodies and were capable of substituting for the inactivated mouse Ig genes. This was demonstrated by their ability to induce B cell development, to produce an adult-like human repertoire of fully human antibodies, and to generate antigen-specific human mAbs. These results also suggested that introduction of larger portions of the human Ig loci containing greater numbers of V genes, additional regulatory elements, and human Ig constant regions may recapitulate substantially the full repertoire that is characteristic of the human humoral response to infection and immunization. The work of Green et al. was recently extended to the introduction of greater than approximately 80% of the human antibody repertoire through introduction of megabase sized, germline configuration YAC fragments of the human heavy chain loci and kappa light chain loci, respectively. See Mendez et al. Nature Genetics 15:146-156 (1997) and U.S. patent application Ser. No. 08/759,620.

[0246] The production of the XenoMouseanimals is further discussed and delineated in U.S. patent application Ser. No. 07/466,008, Ser. No. 07/610,515, Ser. No. 07/919,297, Ser. No. 07/922,649, Ser. No. 08/031,801, Ser. No. 08/112,848, Ser. No. 08/234,145, Ser. No. 08/376,279, Ser. No. 08/430,938, Ser. No. 08/464,584, Ser. No. 08/464,582, Ser. No. 08/463,191, Ser. No. 08/462,837, Ser. No. 08/486,853, Ser. No. 08/486,857, Ser. No. 08/486,859, Ser. No. 08/462,513, Ser. No. 08/724,752, and Ser. No. 08/759,620; and U.S. Pat. Nos. 6,162,963; 6,150,584; 6,114,598; 6,075,181, and 5,939,598 and Japanese Patent Nos. 3 068 180 B2, 3 068 506 B2, and 3 068 507 B2. See also Mendez et al. Nature Genetics 15:146-156 (1997) and Green and Jakobovits J. Exp. Med. 188:483-495 (1998), EP 0 463 151 B1, WO 94/02602. WO 96/34096, WO 98/24893, WO 00/76310, and WO 03/47336.

[0247] In an alternative approach, others, including GenPharm International, Inc., have utilized a “minilocus” approach. In the minilocus approach, an exogenous Ig locus is mimicked through the inclusion of pieces (individual genes) from the Ig locus. Thus, one or more VH genes, one or more DH genes, one or more JH genes, a mu constant region, and a second constant region (preferably a gamma constant region) are formed into a construct for insertion into an animal. This approach is described in U.S. Pat. No. 5,545,807 to Surani et al. and U.S. Pat. Nos. 5,545,806; 5,625,825; 5,625,126; 5,633,425; 5,661,016; 5,770,429; 5,789,650; 5,814,318; 5,877,397; 5,874,299; and 6,255,458 each to Lonberg and Kay, U.S. Pat. Nos. 5,591,669 and 6,023,010 to Krimpenfort and Berns, U.S. Pat. Nos. 5,612,205; 5,721,367; 5,789,215 to Berns et al., and U.S. Pat. No. 5,643,763 to Choi and Dunn, and GenPharm International U.S. patent application Ser. No. 07/574,748, Ser. No. 07/575,962, Ser. No. 07/810,279, Ser. No. 07/853,408, Ser. No. 07/904,068, Ser. No. 07/990,860, Ser. No. 08/053,131, Ser. No. 08/096,762, Ser. No. 08/155,301, Ser. No. 08/161,739, Ser. No. 08/165,699, Ser. No. 08/209,741. See also EP 0 546 073 B1, WO 92/03918, WO 92/22645, WO 92/22647, WO 92/22670, WO 93/12227, WO 94/00569, WO 94/25585, WO 96/14436, WO 97/13852, and WO 98/24884 and U.S. Pat. No. 5,981,175. See further Taylor et al. (1992), Chen et al. (1993), Tuaillon et al. (1993), Choi et al. (1993), Lonberg et al. (1994), Taylor et al. (1994), and Tuaillon et al. (1995), Fishwild et al. (1996).

[0248] Kirin has also demonstrated the generation of human antibodies from mice in which, through microcell fusion, large pieces of chromosomes, or entire chromosomes, have been introduced. See European Patent Application Nos. 773 288 and 843 961. Xenerex Biosciences is developing a technology for the potential generation of human antibodies. In this technology, SCID mice are reconstituted with human lymphatic cells, e.g., B and/or T cells. Mice are then immunized with an antigen and can generate an immune response against the antigen. See U.S. Pat. Nos. 5,476,996; 5,698,767; and 5,958,765.

[0249] Human anti-mouse antibody (HAMA) responses have led the industry to prepare chimeric or otherwise humanized antibodies. It is however expected that certain human anti-chimeric antibody (HACA) responses will be observed, particularly in chronic or multi-dose utilizations of the antibody. Thus, it would be desirable to provide antigen-binding molecules comprising a human binding domain against CS1, BCMA, CD20, CD22, FLT3, CD123, CLL1, CDH3, MSLN, or EpCAM and a human binding domain against CD3ε in order to vitiate concerns and/or effects of HAMA or HACA response.

[0250] The terms “(specifically) binds to”, (specifically) recognizes”, “is (specifically) directed to”, and “(specifically) reacts with” mean in accordance with this invention that a binding domain interacts or specifically interacts with a given epitope or a given target side on the target molecules (antigens), here: CS1, BCMA, CD20, CD22, FLT3, CD123, CLL1, CDH3, MSLN, or EpCAM, and CD3ε as effector, respectively.

[0251] The term “epitope” refers to a side on an antigen to which a binding domain, such as an antibody or immunoglobulin, or a derivative, fragment or variant of an antibody or an immunoglobulin, specifically binds. An “epitope” is antigenic and thus the term epitope is sometimes also referred to herein as “antigenic structure” or “antigenic determinant”. Thus, the binding domain is an “antigen interaction side”. Said binding/interaction is also understood to define a “specific recognition”.

[0252] “Epitopes” can be formed both by contiguous amino acids or non-contiguous amino acids juxtaposed by tertiary folding of a protein. A “linear epitope” is an epitope where an amino acid primary sequence comprises the recognized epitope. A linear epitope typically includes at least 3 or at least 4, and more usually, at least 5 or at least 6 or at least 7, for example, about 8 to about 10 amino acids in a unique sequence.

[0253] A “conformational epitope”, in contrast to a linear epitope, is an epitope wherein the primary sequence of the amino acids comprising the epitope is not the sole defining component of the epitope recognized (e.g., an epitope wherein the primary sequence of amino acids is not necessarily recognized by the binding domain). Typically, a conformational epitope comprises an increased number of amino acids relative to a linear epitope. With regard to recognition of conformational epitopes, the binding domain recognizes a three-dimensional structure of the antigen, preferably a peptide or protein or fragment thereof (in the context of the present invention, the antigenic structure for one of the binding domains is comprised within the target cell surface antigen protein). For example, when a protein molecule folds to form a three-dimensional structure, certain amino acids and/or the polypeptide backbone forming the conformational epitope become juxtaposed enabling the antibody to recognize the epitope. Methods of determining the conformation of epitopes include, but are not limited to, x-ray crystallography, two-dimensional nuclear magnetic resonance (2D-NMR) spectroscopy and site-directed spin labelling and electron paramagnetic resonance (EPR) spectroscopy.

[0254] A method for epitope mapping is described in the following: When a region (a contiguous amino acid stretch) in the human CS1, BCMA, CD20, CD22, FLT3, CD123, CLL1, CDH3, MSLN, or EpCAM protein is exchanged or replaced with its corresponding region of a non-human and non-primate CS1, BCMA, CD20, CD22, FLT3, CD123, CLL1, CDH3, MSLN, or EpCAM (e.g., mouse CS1. BCMA, CD20, CD22, FLT3, CD123, CLL1, CDH3, MSLN, or EpCAM, but others like chicken, rat, hamster, rabbit etc. may also be conceivable), a decrease in the binding of the binding domain is expected to occur, unless the binding domain is cross-reactive for the non-human, non-primate CS1, BCMA, CD20, CD22, FLT3, CD123, CLL1, CDH3, MSLN, or EpCAM used. Said decrease is preferably at least 10%, 20%, 30%, 40%, or 50%; more preferably at least 60%, 70%, or 80%, and most preferably 90%, 95% or even 100% in comparison to the binding to the respective region in the human CS1, BCMA, CD20, CD22, FLT3, CD123, CLL1, CDH3, MSLN, or EpCAM protein, whereby binding to the respective region in the human CS1, BCMA, CD20, CD22, FLT3, CD123, CLL1, CDH3, MSLN, or EpCAM protein is set to be 100%. It is envisaged that the aforementioned human CS1, BCMA, CD20, CD22, FLT3, CD123, CLL1, CDH3, MSLN, or EpCAM/non-human CS1, BCMA, CD20, CD22, FLT3, CD123, CLL1, CDH3, MSLN, or EpCAM chimeras are expressed in CHO cells. It is also envisaged that the human CS1, BCMA, CD20, CD22, FLT3, CD123, CLL1, CDH3, MSLN, or EpCAM/non-human CS1, BCMA, CD20, CD22, FLT3, CD123, CLL1, CDH3, MSLN, or EpCAM chimeras are fused with a transmembrane domain and/or cytoplasmic domain of a different membrane-bound protein such as EpCAM.

[0255] In an alternative or additional method for epitope mapping, several truncated versions of the human CS1, BCMA, CD20, CD22, FLT3, CD123, CLL1, CDH3, MSLN, or EpCAM extracellular domain can be generated in order to determine a specific region that is recognized by a binding domain. In these truncated versions, the different extracellular CS1, BCMA, CD20, CD22, FLT3, CD123, CLL1, CDH3, MSLN, or EpCAM domains/sub-domains or regions are stepwise deleted, starting from the N-terminus. It is envisaged that the truncated CS1, BCMA, CD20, CD22, FLT3, CD123, CLL1, CDH3, MSLN, or EpCAM versions may be expressed in CHO cells. It is also envisaged that the truncated CS1, BCMA, CD20, CD22, FLT3, CD123, CLL1, CDH3, MSLN, or EpCAM versions may be fused with a transmembrane domain and/or cytoplasmic domain of a different membrane-bound protein such as EpCAM. It is also envisaged that the truncated CS1. BCMA, CD20, CD22, FLT3, CD123, CLL1, CDH3, MSLN, or EpCAM versions may encompass a signal peptide domain at their N-terminus, for example a signal peptide derived from mouse IgG heavy chain signal peptide. It is furthermore envisaged that the truncated CS1, BCMA, CD20, CD22, FLT3, CD123, CLL1, CDH3, MSLN, or EpCAM versions may encompass a v5 domain at their N-terminus (following the signal peptide) which allows verifying their correct expression on the cell surface. A decrease or a loss of binding is expected to occur with those truncated CS1, BCMA, CD20, CD22, FLT3, CD123, CLL1, CDH3, MSLN, or EpCAM versions which do not encompass any more the CS1, BCMA, CD20, CD22, FLT3, CD123, CLL1, CDH3, MSLN, or EpCAM region that is recognized by the binding domain. The decrease of binding is preferably at least 10%, 20%, 30%, 40%, 50%; more preferably at least 60%, 70%, 80%, and most preferably 90%, 95% or even 100%, whereby binding to the entire human CS1, BCMA, CD20, CD22, FLT3, CD123, CLL1, CDH3, MSLN, or EpCAM protein (or its extracellular region or domain) is set to be 100.

[0256] A further method to determine the contribution of a specific residue of CS1, BCMA, CD20, CD22, FLT3, CD123, CLL1, CDH3, MSLN, or EpCAM to the recognition by an antigen-binding molecule or binding domain is alanine scanning (see e.g. Morrison K L & Weiss G A. Cur Opin Chem Biol. 2001 June;5(3):302-7), where each residue to be analyzed is replaced by alanine, e.g. via site-directed mutagenesis. Alanine is used because of its non-bulky, chemically inert, methyl functional group that nevertheless mimics the secondary structure references that many of the other amino acids possess. Sometimes bulky amino acids such as valine or leucine can be used in cases where conservation of the size of mutated residues is desired. Alanine scanning is a mature technology which has been used for a long period of time.

[0257] The interaction between the binding domain and the epitope or the region comprising the epitope implies that a binding domain exhibits appreciable affinity for the epitope/the region comprising the epitope on a particular protein or antigen (here: CD20, CD22, FLT3, CD123, CLL1, CDH3, MSLN, or EpCAM and CD3, respectively) and, generally, does not exhibit significant reactivity with proteins or antigens other than the CS1, BCMA, CD20, CD22, FLT3, CD123, CLL1, CDH3, MSLN, or EpCAM or CD3. “Appreciable affinity” includes binding with an affinity of about 10⁻⁶ M (KD) or stronger. Preferably, binding is considered specific when the binding affinity is about 10⁻¹² to 10⁻⁸ M, 10⁻¹² to 10⁻⁹ M, 10⁻¹² to 10⁻¹⁰ M, 10⁻¹¹ to 10⁻⁸ M, preferably of about 10⁻¹¹ to 10⁻⁹ M. Whether a binding domain specifically reacts with or binds to a target can be tested readily by, inter alia, comparing the reaction of said binding domain with a target protein or antigen with the reaction of said binding domain with proteins or antigens other than the CS1, BCMA, CD20, CD22, FLT3, CD123, CLL1, CDH3, MSLN, or EpCAM or CD3. Preferably, a binding domain of the invention does not essentially or substantially bind to proteins or antigens other than CS1, BCMA, CD20, CD22, FLT3, CD123, CLL1, CDH3, MSLN, or EpCAM or CD3 (i.e., the first binding domain is not capable of binding to proteins other than CS1, BCMA, CD20, CD22, FLT3, CD123, CLL1, CDH3, MSLN, or EpCAM and the second binding domain is not capable of binding to proteins other than CD3). It is an envisaged characteristic of the antigen-binding molecules according to the present invention to have superior affinity characteristics in comparison to other HLE formats. Such a superior affinity, in consequence, suggests a prolonged half-life in vivo. The longer half-life of the antigen-binding molecules according to the present invention may reduce the duration and frequency of administration which typically contributes to improved patient compliance. This is of particular importance as the antigen-binding molecules of the present invention are particularly beneficial for highly weakened or even multimorbid cancer patients.

[0258] The term “does not essentially/substantially bind” or “is not capable of binding” means that a binding domain of the present invention does not bind a protein or antigen other than the CS1, BCMA. CD20, CD22, FLT3, CD123, CLL1, CDH3, MSLN, or EpCAM or CD3 as effector, i.e., does not show reactivity of more than 30%, preferably not more than 20%, more preferably not more than 10%, particularly preferably not more than 9%, 8%, 7%, 6% or 5% with proteins or antigens other than CS1, BCMA, CD20, CD22, FLT3, CD123, CLL1, CDH3, MSLN, or EpCAM or CD3 as effector, whereby binding to the CS1, BCMA, CD20, CD22, FLT3, CD123, CLL1, CDH3, MSLN, or EpCAM or CD3 as effector, respectively, is set to be 100%.

[0259] Specific binding is believed to be effected by specific motifs in the amino acid sequence of the binding domain and the antigen. Thus, binding is achieved as a result of their primary, secondary and/or tertiary structure as well as the result of secondary modifications of said structures. The specific interaction of the antigen-interaction-side with its specific antigen may result in a simple binding of said side to the antigen. Moreover, the specific interaction of the antigen-interaction-side with its specific antigen may alternatively or additionally result in the initiation of a signal, e.g. due to the induction of a change of the conformation of the antigen, an oligomerization of the antigen, etc.

[0260] The term “variable” refers to the portions of the antibody or immunoglobulin domains that exhibit variability in their sequence and that are involved in determining the specificity and binding affinity of a particular antibody (i.e., the “variable domain(s)”). The pairing of a variable heavy chain (VH) and a variable light chain (VL) together forms a single antigen-binding site.

[0261] Variability is not evenly distributed throughout the variable domains of antibodies; it is concentrated in sub-domains of each of the heavy and light chain variable regions. These sub-domains are called “hypervariable regions” or “complementarity determining regions” (CDRs). The more conserved (i.e., non-hypervariable) portions of the variable domains are called the “framework” regions (FRM or FR) and provide a scaffold for the six CDRs in three dimensional space to form an antigen-binding surface. The variable domains of naturally occurring heavy and light chains each comprise four FRM regions (FR1, FR2, FR3, and FR4), largely adopting a β-sheet configuration, connected by three hypervariable regions, which form loops connecting, and in some cases forming part of, the β-sheet structure. The hypervariable regions in each chain are held together in close proximity by the FRM and, with the hypervariable regions from the other chain, contribute to the formation of the antigen-binding side (see Kabat et al., loc. cit.).

[0262] The terms “CDR”, and its plural “CDRs”, refer to the complementarity determining region of which three make up the binding character of a light chain variable region (CDR-L1, CDR-L2 and CDR-L3) and three make up the binding character of a heavy chain variable region (CDR-H1, CDR-H2 and CDR-H3). CDRs contain most of the residues responsible for specific interactions of the antibody with the antigen and hence contribute to the functional activity of an antibody molecule: they are the main determinants of antigen specificity.

[0263] The exact definitional CDR boundaries and lengths are subject to different classification and numbering systems. CDRs may therefore be referred to by Kabat, Chothia, contact or any other boundary definitions, including the numbering system described herein. Despite differing boundaries, each of these systems has some degree of overlap in what constitutes the so called “hypervariable regions” within the variable sequences. CDR definitions according to these systems may therefore differ in length and boundary areas with respect to the adjacent framework region. See for example Kabat (an approach based on cross-species sequence variability), Chothia (an approach based on crystallographic studies of antigen-antibody complexes), and/or MacCallum (Kabat et al., loc. cit.; Chothia et al., J. Mol. Biol, 1987, 196: 901-917; and MacCallum et al., J. Mol. Biol, 1996, 262: 732). Still another standard for characterizing the antigen binding side is the AbM definition used by Oxford Molecular's AbM antibody modeling software. See, e.g., Protein Sequence and Structure Analysis of Antibody Variable Domains. In: Antibody Engineering Lab Manual (Ed.: Duebel, S. and Kontermann, R., Springer-Verlag, Heidelberg). To the extent that two residue identification techniques define regions of overlapping, but not identical regions, they can be combined to define a hybrid CDR. However, the numbering in accordance with the so-called Kabat system is preferred.

[0264] Typically, CDRs form a loop structure that can be classified as a canonical structure. The term “canonical structure” refers to the main chain conformation that is adopted by the antigen binding (CDR) loops. From comparative structural studies, it has been found that five of the six antigen binding loops have only a limited repertoire of available conformations. Each canonical structure can be characterized by the torsion angles of the polypeptide backbone. Correspondent loops between antibodies may, therefore, have very similar three dimensional structures, despite high amino acid sequence variability in most parts of the loops (Chothia and Lesk, J. Mol. Biol., 1987, 196: 901; Chothia et al., Nature, 1989, 342: 877; Martin and Thornton, J. Mol. Biol, 1996, 263: 800). Furthermore, there is a relationship between the adopted loop structure and the amino acid sequences surrounding it. The conformation of a particular canonical class is determined by the length of the loop and the amino acid residues residing at key positions within the loop, as well as within the conserved framework (i.e., outside of the loop). Assignment to a particular canonical class can therefore be made based on the presence of these key amino acid residues.

[0265] The term “canonical structure” may also include considerations as to the linear sequence of the antibody, for example, as catalogued by Kabat (Kabat et al., loc. cit.). The Kabat numbering scheme (system) is a widely adopted standard for numbering the amino acid residues of an antibody variable domain in a consistent manner and is the preferred scheme applied in the present invention as also mentioned elsewhere herein. Additional structural considerations can also be used to determine the canonical structure of an antibody. For example, those differences not fully reflected by Kabat numbering can be described by the numbering system of Chothia et al. and/or revealed by other techniques, for example, crystallography and two- or three-dimensional computational modeling. Accordingly, a given antibody sequence may be placed into a canonical class which allows for, among other things, identifying appropriate chassis sequences (e.g., based on a desire to include a variety of canonical structures in a library). Kabat numbering of antibody amino acid sequences and structural considerations as described by Chothia et al., loc. cit. and their implications for construing canonical aspects of antibody structure, are described in the literature. The subunit structures and three-dimensional configurations of different classes of immunoglobulins are well known in the art. For a review of the antibody structure, see Antibodies: A Laboratory Manual, Cold Spring Harbor Laboratory, eds. Harlow et al., 1988.

[0266] The CDR3 of the light chain and, particularly, the CDR3 of the heavy chain may constitute the most important determinants in antigen binding within the light and heavy chain variable regions. In some antigen-binding molecules, the heavy chain CDR3 appears to constitute the major area of contact between the antigen and the antibody. In vitro selection schemes in which CDR3 alone is varied can be used to vary the binding properties of an antibody or determine which residues contribute to the binding of an antigen. Hence, CDR3 is typically the greatest source of molecular diversity within the antibody-binding side. H3, for example, can be as short as two amino acid residues or greater than 26 amino acids.

[0267] In a classical full-length antibody or immunoglobulin, each light (L) chain is linked to a heavy (H) chain by one covalent disulfide bond, while the two H chains are linked to each other by one or more disulfide bonds depending on the H chain isotype. The CH domain most proximal to VH is usually designated as CH1. The constant (“C”) domains are not directly involved in antigen binding, but exhibit various effector functions, such as antibody-dependent, cell-mediated cytotoxicity and complement activation. The Fc region of an antibody is comprised within the heavy chain constant domains and is for example able to interact with cell surface located Fc receptors.

[0268] The sequence of antibody genes after assembly and somatic mutation is highly varied, and these varied genes are estimated to encode 1010 different antibody molecules (Immunoglobulin Genes, 2^{nd} ed., eds. Jonio et al., Academic Press, San Diego, C A. 1995). Accordingly, the immune system provides a repertoire of immunoglobulins. The term “repertoire” refers to at least one nucleotide sequence derived wholly or partially from at least one sequence encoding at least one immunoglobulin. The sequence(s) may be generated by rearrangement in vivo of the V. D, and J segments of heavy chains, and the V and J segments of light chains. Alternatively, the sequence(s) can be generated from a cell in response to which rearrangement occurs, e.g., in vitro stimulation. Alternatively, part or all of the sequence(s) may be obtained by DNA splicing, nucleotide synthesis, mutagenesis, and other methods, see, e.g., U.S. Pat. No. 5,565,332. A repertoire may include only one sequence or may include a plurality of sequences, including ones in a genetically diverse collection.

[0269] The term “Fc portion” or “Fc monomer” means in connection with this invention a polypeptide comprising at least one domain having the function of a CH2 domain and at least one domain having the function of a CH3 domain of an immunoglobulin molecule. As apparent from the term “Fc monomer”, the polypeptide comprising those CH domains is a “polypeptide monomer”. An Fc monomer can be a polypeptide comprising at least a fragment of the constant region of an immunoglobulin excluding the first constant region immunoglobulin domain of the heavy chain (CH1), but maintaining at least a functional part of one CH2 domain and a functional part of one CH3 domain, wherein the CH2 domain is amino terminal to the CH3 domain. In a preferred aspect of this definition, an Fc monomer can be a polypeptide constant region comprising a portion of the Ig-Fc hinge region, a CH2 region and a CH3 region, wherein the hinge region is amino terminal to the CH2 domain. It is envisaged that the hinge region of the present invention promotes dimerization. Such Fc polypeptide molecules can be obtained by papain digestion of an immunoglobulin region (of course resulting in a dimer of two Fc polypeptide), for example and not limitation. In another aspect of this definition, an Fc monomer can be a polypeptide region comprising a portion of a CH2 region and a CH3 region. Such Fc polypeptide molecules can be obtained by pepsin digestion of an immunoglobulin molecule, for example and not limitation. In one embodiment, the polypeptide sequence of an Fc monomer is substantially similar to an Fc polypeptide sequence of: an IgG Fc region, an IgG₂ Fc region, an IgG₃ Fc region, an IgG₄ Fc region, an IgM Fc region, an IgA Fc region, an IgD Fc region and an IgE Fc region. (See, e.g., Padlan, Molecular Immunology, 31(3), 169-217 (1993)). Because there is some variation between immunoglobulins, and solely for clarity, Fc monomer refers to the last two heavy chain constant region immunoglobulin domains of IgA, IgD, and IgG, and the last three heavy chain constant region immunoglobulin domains of IgE and IgM. As mentioned, the Fc monomer can also include the flexible hinge N-terminal to these domains. For IgA and IgM, the Fc monomer may include the J chain. For IgG, the Fc portion comprises immunoglobulin domains CH2 and CH3 and the hinge between the first two domains and CH2. Although the boundaries of the Fc portion may vary an example for a human IgG heavy chain Fc portion comprising a functional hinge, CH2 and CH3 domain can be defined e.g. to comprise residues D231 (of the hinge domain—corresponding to D234 in Table 1 below) to P476, respectively L476 (for IgG₄) of the carboxyl-terminus of the CH3 domain, wherein the numbering is according to Kabat. The two Fc portion or Fc monomer, which are fused to each other via a peptide linker are a preferred example of the spacer between the two bispecific entities of the antigen-binding molecule of the invention, which may also be defined as scFc domain.

[0270] In one embodiment of the invention it is envisaged that a scFc domain as disclosed herein, respectively the Fc monomers fused to each other are comprised only in the spacer of the antigen-binding molecule.

[0271] In line with the present invention an IgG hinge region can be identified by analogy using the Kabat numbering as set forth in Table 1. In line with the above, it is envisaged that for a hinge domain/region of the present invention the minimal requirement comprises the amino acid residues corresponding to the IgG1 sequence stretch of D231 D234 to P243 according to the Kabat numbering. It is likewise envisaged that a hinge domain/region of the present invention comprises or consists of the IgG1 hinge sequence DKTHTCPPCP (SEQ ID NO: 330) (corresponding to the stretch D234 to P243 as shown in Table 1 below—variations of said sequence are also envisaged provided that the hinge region still promotes dimerization). In a preferred embodiment of the invention the glycosylation site at Kabat position 314 of the CH2 domains in the spacer of the antigen-binding molecule is removed by a N314X substitution, wherein X is any amino acid excluding Q. Said substitution is preferably a N314G substitution. In a more preferred embodiment, said CH2 domain additionally comprises the following substitutions (position according to Kabat) V321C and R309C (these substitutions introduce the intra domain cysteine disulfide bridge at Kabat positions 309 and 321).

[0272] It is also envisaged that the spacer of the antigen-binding molecule of the invention is a scFc domain which comprises or consists in an amino to carboxyl order: DKTHTCPPCP (SEQ ID NO: 330) (i.e. hinge) -CH2-CH3-linker-DKTHTCPPCP (SEQ ID NO: 330) (i.e. hinge) -CH2-CH3. The peptide linker of the aforementioned antigen-binding molecule is in a preferred embodiment characterized by the amino acid sequence Gly-Gly-Gly-Gly-Ser, i.e. Gly4Ser (SEQ ID NO: 7), or polymers thereof, i.e. (Gly4Ser)x, where x is an integer of 5 or greater (e.g. 5, 6, 7, 8 etc. or greater), 6 being preferred ((Gly4Ser)6). Said construct may further comprise the aforementioned substitutions: N314X, preferably N314G, and/or the further substitutions V321C and R309C. In a preferred embodiment of the antigen-binding molecules of the invention as defined herein before, it is envisaged that the second domain binds to an extracellular epitope of the human and/or the Macaca CD3ε chain.

TABLE 1
Kabat numbering of the amino acid residues of the hinge region

| IMGT | | |
|---|---|---|
| numbering for | IgG₁ amino acid | Kabat |
| the hinge | translation | numbering |
| 1 | (E) | 226 |
| 2 | P | 227 |
| 3 | K | 228 |
| 4 | S | 232 |
| 5 | C | 233 |
| 6 | D | 234 |
| 7 | K | 235 |
| 8 | T | 236 |
| 9 | H | 237 |
| 10 | T | 238 |
| 11 | C | 239 |
| 12 | P | 240 |
| 13 | P | 241 |
| 14 | C | 242 |
| 15 | P | 243 |

[0273] In further embodiments of the present invention, the hinge domain/region comprises or consists of the IgG2 subtype hinge sequence ERKCCVECPPCP (SEQ ID NO: 331), the IgG3 subtype hinge sequence ELKTPLDTTHTCPRCP (SEQ ID NO: 332) or ELKTPLGDTTHTCPRCP (SEQ ID NO:333), and/or the IgG4 subtype hinge sequence ESKYGPPCPSCP (SEQ ID NO: 444). The IgG1 subtype hinge sequence may be the following one EPKSCDKTHTCPPCP (as shown in Table 1 and SEQ ID NO: 445). These core hinge regions are thus also envisaged in the context of the present invention.

[0274] The location and sequence of the IgG CH2 and IgG CD3 domain can be identified by analogy using the Kabat numbering as set forth in Table 2:

TABLE 2
Kabat numbering of the amino acid residues
of the IgG CH2 and CH3 region

| IgG | CH2 aa | CH2 Kabat | CH3 aa | CH3 Kabat |
|---|---|---|---|---|
| subtype | translation | numbering | translation | numbering |
| IgG₁ | APE . . . KAK | 244 . . . 360 | GQP . . . PGK | 361 . . . 478 |
| IgG₂ | APP . . . KTK | 244 . . . 360 | GQP . . . PGK | 361 . . . 478 |
| IgG₃ | APE . . . KTK | 244 . . . 360 | GQP . . . PGK | 361 . . . 478 |
| IgG₄ | APE . . . KAK | 244 . . . 360 | GQP . . . LGK | 361 . . . 478 |

[0275] In one embodiment of the invention the emphasized bold amino acid residues in the CH3 domain of the first or both Fc monomers are deleted.

[0276] The peptide linker, by whom the polypeptide monomers (“Fc portion” or “Fc monomer”) of the spacer are fused to each other, preferably comprises at least 25 amino acid residues (25, 26, 27, 28, 29, 30 etc.). More preferably, this peptide linker comprises at least 30 amino acid residues (30, 31, 32, 33, 34, 35 etc.). It is also preferred that the linker comprises up to 40 amino acid residues, more preferably up to 35 amino acid residues, most preferably exactly 30 amino acid residues. A preferred embodiment of such peptide linker is characterized by the amino acid sequence Gly-Gly-Gly-Gly-Ser, i.e. Gly₄Ser (SEQ ID NO: 7), or polymers thereof, i.e. (Gly₄Ser)x, where x is an integer of 5 or greater (e.g. 6, 7 or 8). Preferably the integer is 6 or 7, more preferably the integer is 6.

[0277] In the event that a linker is used to fuse the first domain to the second domain, and/or the third to the fourth domain, and/or the second and the third domain to the spacer, this linker is preferably of a length and sequence sufficient to ensure that each of the first and second domains can, independently from one another, retain their differential binding specificities. For peptide linkers which connect the at least two binding domains (or two variable domains) in the antigen-binding molecule of the invention, those peptide linkers are preferred which comprise only a few number of amino acid residues, e.g. 12 amino acid residues or less. Thus, peptide linkers of 12, 11, 10, 9, 8, 7, 6 or 5 amino acid residues are preferred. An envisaged peptide linker with less than 5 amino acids comprises 4, 3, 2 or one amino acid(s), wherein Gly-rich linkers are preferred. A preferred embodiment of the peptide linker for a fusion the first and the second domain is depicted in SEQ ID NO:1. A preferred linker embodiment of the peptide linker for fusing the second and the third domain to the spacer is a (Gly)₄-linker, also called G₄-linker.

[0278] A particularly preferred “single” amino acid in the context of one of the above described “peptide linker” is Gly. Accordingly, said peptide linker may consist of the single amino acid Gly. In a preferred embodiment of the invention a peptide linker is characterized by the amino acid sequence Gly-Gly-Gly-Gly-Ser, i.e. Gly₄Ser (SEQ ID NO: 1), or polymers thereof, i.e. (Gly₄Ser)x, where x is an integer of 1 or greater (e.g. 2 or 3). Preferred linkers are depicted in SEQ ID NOs: 1 to 12. The characteristics of said peptide linker, which comprise the absence of the promotion of secondary structures, are known in the art and are described e.g. in Dall'Acqua et al. (Biochem. (1998) 37, 9266-9273), Cheadle et al. (Mol Immunol (1992) 29, 21-30) and Raag and Whitlow (FASEB (1995) 9(1), 73-80). Peptide linkers which furthermore do not promote any secondary structures are preferred. The linkage of said domains to each other can be provided, e.g., by genetic engineering, as described in the examples. Methods for preparing fused and operatively linked bispecific single chain constructs and expressing them in mammalian cells or bacteria are well-known in the art (e.g. WO 99/54440 or Sambrook et al., Molecular Cloning: A Laboratory Manual, Cold Spring Harbor Laboratory Press, Cold Spring Harbor, New York, 2001).

[0279] In a preferred embodiment of the antigen-binding molecule or the present invention the first and second domain form an antigen-binding molecule in a format selected from the group consisting of (scFv)₂, scFv-single domain mAb, diabody and oligomers of any of these formats.

[0280] According to a particularly preferred embodiment, and as documented in the appended examples, the first and the second domain of the antigen-binding molecule of the invention is a “bispecific single chain antigen-binding molecule”, more preferably a bispecific “single chain Fv” (scFv). Although the two domains of the Fv fragment, VL and VH, are coded for by separate genes, they can be joined, using recombinant methods, by a synthetic linker—as described hereinbefore—that enables them to be made as a single protein chain in which the VL and VH regions pair to form a monovalent molecule; see e.g., Huston et al. (1988) Proc. Natl. Acad. Sci USA 85:5879-5883). These antibody fragments are obtained using conventional techniques known to those with skill in the art, and the fragments are evaluated for function in the same manner as are whole or full-length antibodies. A single-chain variable fragment (scFv) is hence a fusion protein of the variable region of the heavy chain (VH) and of the light chain (VL) of immunoglobulins, usually connected with a short linker peptide of about ten to about 25 amino acids, preferably about 15 to 20 amino acids. The linker is usually rich in glycine for flexibility, as well as serine or threonine for solubility, and can either connect the N-terminus of the VH with the C-terminus of the VL, or vice versa. This protein retains the specificity of the original immunoglobulin, despite removal of the constant regions and introduction of the linker.

[0281] Bispecific single chain antigen-binding molecules are known in the art and are described in WO 99/54440, Mack, J. Immunol. (1997), 158, 3965-3970, Mack, PNAS, (1995), 92, 7021-7025, Kufer, Cancer Immunol. Immunother., (1997), 45, 193-197. Löffler, Blood, (2000), 95, 6, 2098-2103, Brühl, Immunol., (2001), 166, 2420-2426, Kipriyanov, J. Mol. Biol., (1999), 293, 41-56. Techniques described for the production of single chain antibodies (see, inter alia, U.S. Pat. No. 4,946,778, Kontermann and Dübel (2010), loc. cit. and Little (2009), loc. cit.) can be adapted to produce single chain antigen-binding molecules specifically recognizing (an) elected target(s).

[0282] Bivalent (also called divalent) or bispecific single-chain variable fragments (bi-scFvs or di-scFvs having the format (scFv)₂ can be engineered by linking two scFv molecules (e.g. with linkers as described hereinbefore). If these two scFv molecules have the same binding specificity, the resulting (scFv)₂ molecule will preferably be called bivalent (i.e. it has two valences for the same target epitope). If the two scFv molecules have different binding specificities, the resulting (scFv)₂ molecule will preferably be called bispecific. The linking can be done by producing a single peptide chain with two VH regions and two VL regions, yielding tandem scFvs (see e.g. Kufer P. et al., (2004) Trends in Biotechnology 22(5):238-244). Another possibility is the creation of scFv molecules with linker peptides that are too short for the two variable regions to fold together (e.g. about five amino acids), forcing the scFvs to dimerize. This type is known as diabodies (see e.g. Hollinger, Philipp et al., (July 1993) Proceedings of the National Academy of Sciences of the United States of America 90 (14): 6444-8).

[0283] In line with this invention either the first, the second or the first and the second domain may comprise a single domain antibody, respectively the variable domain or at least the CDRs of a single domain antibody. Single domain antibodies comprise merely one (monomeric) antibody variable domain which is able to bind selectively to a specific antigen, independently of other V regions or domains. The first single domain antibodies were engineered from heavy chain antibodies found in camelids, and these are called V_{H}H fragments. Cartilaginous fishes also have heavy chain antibodies (IgNAR) from which single domain antibodies called VNAR fragments can be obtained. An alternative approach is to split the dimeric variable domains from common immunoglobulins e.g. from humans or rodents into monomers, hence obtaining VH or VL as a single domain Ab. Although most research into single domain antibodies is currently based on heavy chain variable domains, nanobodies derived from light chains have also been shown to bind specifically to target epitopes. Examples of single domain antibodies are called sdAb, nanobodies or single variable domain antibodies.

[0284] A (single domain mAb)₂ is hence a monoclonal antigen-binding molecule composed of (at least) two single domain monoclonal antibodies, which are individually selected from the group comprising V_{H}, V_{L}, V_{H}H and V_{NAR}. The linker is preferably in the form of a peptide linker. Similarly, an “scFv-single domain mAb” is a monoclonal antigen-binding molecule composed of at least one single domain antibody as described above and one scFv molecule as described above. Again, the linker is preferably in the form of a peptide linker.

[0285] Whether or not an antigen-binding molecule competes for binding with another given antigen-binding molecule can be measured in a competition assay such as a competitive ELISA or a cell-based competition assay. Avidin-coupled microparticles (beads) can also be used. Similar to an avidin-coated ELISA plate, when reacted with a biotinylated protein, each of these beads can be used as a substrate on which an assay can be performed. Antigen is coated onto a bead and then precoated with the first antibody. The second antibody is added and any additional binding is determined. Possible means for the read-out includes flow cytometry.

[0286] T cells or T lymphocytes are a type of lymphocyte (itself a type of white blood cell) that play a central role in cell-mediated immunity. There are several subsets of T cells, each with a distinct function. T cells can be distinguished from other lymphocytes, such as B cells and NK cells, by the presence of a T cell receptor (TCR) on the cell surface. The TCR is responsible for recognizing antigens bound to major histocompatibility complex (MHC) molecules and is composed of two different protein chains. In 95% of the T cells, the TCR consists of an alpha (a) and beta (B) chain. When the TCR engages with antigenic peptide and MHC (peptide/MHC complex), the T lymphocyte is activated through a series of biochemical events mediated by associated enzymes, co-receptors, specialized adaptor molecules, and activated or released transcription factors.

[0287] The CD3 receptor complex is a protein complex and is composed of four chains. In mammals, the complex contains a CD3γ (gamma) chain, a CD3ε (delta) chain, and two CD3ε (epsilon) chains. These chains associate with the T cell receptor (TCR) and the so-called ((zeta) chain to form the T cell receptor CD3 complex and to generate an activation signal in T lymphocytes. The CD3γ (gamma), CD3δ (delta), and CD3ε (epsilon) chains are highly related cell-surface proteins of the immunoglobulin superfamily containing a single extracellular immunoglobulin domain. The intracellular tails of the CD3 molecules contain a single conserved motif known as an immunoreceptor tyrosine-based activation motif or ITAM for short, which is essential for the signaling capacity of the TCR. The CD3 epsilon molecule is a polypeptide which in humans is encoded by the CD3E gene which resides on chromosome 11. The most preferred epitope of CD3 epsilon is comprised within amino acid residues 1-27 of the human CD3 epsilon extracellular domain. It is envisaged that antigen-binding molecules according to the present invention typically and advantageously show less unspecific T cell activation, which is not desired in specific immunotherapy. This translates to a reduced risk of side effects.

[0288] The redirected lysis of target cells via the recruitment of T cells by a multitargeting least bispecific antigen-binding molecule involves cytolytic synapse formation and delivery of perforin and granzymes. The engaged T cells are capable of serial target cell lysis, and are not affected by immune escape mechanisms interfering with peptide antigen processing and presentation, or clonal T cell differentiation; see, for example, WO 2007/042261.

[0289] Cytotoxicity mediated by antigen-binding molecules of the invention can be measured in various ways. Effector cells can be e.g. stimulated enriched (human) CD8 positive T cells or unstimulated (human) peripheral blood mononuclear cells (PBMC). If the target cells are of macaque origin or express or are transfected with macaque CS1, BCMA, CD20, CD22, FLT3, CD123, CLL1, CHD3, MSLN, or EpCAM which is bound by the first domain, the effector cells should also be of macaque origin such as a macaque T cell line, e.g. 4119LnPx. The target cells should express (at least the extracellular domain of) CS1, BCMA, CD20, CD22, FLT3, CD123, CLL1, CHD3, MSLN, or EpCAM, e.g. human or macaque CS1, BCMA, CD20, CD22, FLT3, CD123, CLL1, CHD3, MSLN, or EpCAM. Target cells can be a cell line (such as CHO) which is stably or transiently transfected with CS1, BCMA, CD20, CD22, FLT3, CD123, CLL1, CHD3, MSLN, or EpCAM, e.g. human or macaque CS1, BCMA, CD20, CD22, FLT3, CD123, CLL1, CHD3, MSLN, or EpCAM. Usually EC₅₀ values are expected to be lower with target cell lines expressing higher levels of CS1. BCMA, CD20, CD22, FLT3, CD123, CLL1, CHD3, MSLN, or EpCAM on the cell surface. The effector to target cell (E:T) ratio is usually about 10:1, but can also vary. Cytotoxic activity of CS1, BCMA. CD20, CD22, FLT3, CD123, CLL1, CHD3, MSLN, or EpCAM bispecific antigen-binding molecules can be measured in a ⁵¹Cr-release assay (incubation time of about 18 hours) or in a in a FACS-based cytotoxicity assay (incubation time of about 48 hours). Modifications of the assay incubation time (cytotoxic reaction) are also possible. Other methods of measuring cytotoxicity are well-known to the skilled person and comprise MTT or MTS assays. ATP-based assays including bioluminescent assays, the sulforhodamine B (SRB) assay, WST assay, clonogenic assay and the ECIS technology.

[0290] The cytotoxic activity mediated by CS1, BCMA, CD20, CD22, FLT3, CD123, CLL1, CHD3, MSLN, or EpCAMxCD3 bispecific antigen-binding molecules of the present invention is preferably measured in a cell-based cytotoxicity assay. It may also be measured in a ⁵¹Cr-release assay. It is represented by the EC₅₀ value, which corresponds to the half maximal effective concentration (concentration of the antigen-binding molecule which induces a cytotoxic response halfway between the baseline and maximum). Preferably, the EC50 value of the CS1, BCMA, CD20, CD22, FLT3, CD123, CLL1, CHD3, MSLN, or EpCAMxCD3 bispecific antigen-binding molecules is ≤5000 μM or ≤4000 μM, more preferably ≤3000 μM or ≤2000 μM, even more preferably ≤1000 μM or ≤500 μM, even more preferably ≤400 μM or ≤300 μM, even more preferably ≤200 μM, even more preferably ≤100 μM, even more preferably ≤50 μM, even more preferably ≤20 μM or ≤10 μM, and most preferably ≤5 μM.

[0291] The above given EC50 values can be measured in different assays. The skilled person is aware that an EC50 value can be expected to be lower when stimulated/enriched CD8+ T cells are used as effector cells, compared with unstimulated PBMC. It can furthermore be expected that the EC50 values are lower when the target cells express a high number of CS1, BCMA, CD20, CD22, FLT3, CD123, CLL1, CHD3, MSLN, or EpCAM compared with a low target expression rat. For example, when stimulated/enriched human CD8+ T cells are used as effector cells (and either CS1, BCMA, CD20, CD22, FLT3, CD123, CLL1, CHD3, MSLN, or EpCAM transfected cells such as CHO cells or CS1, BCMA, CD20, CD22, FLT3, CD123, CLL1, CHD3, MSLN, or EpCAM positive human cell lines are used as target cells), the EC50 value of the CS1, BCMA, CD20, CD22, FLT3, CD123, CLL1, CHD3, MSLN, or EpCAMxCD3 bispecific antigen-binding molecule is preferably ≤1000 μM, more preferably ≤500 μM, even more preferably ≤250 μM, even more preferably ≤100 μM, even more preferably ≤50 μM, even more preferably ≤10 μM, and most preferably ≤5 μM. When human PBMCs are used as effector cells, the EC50 value of the CS1, BCMA, CD20, CD22, FLT3, CD123, CLL1, CHD3, MSLN, or EpCAMxCD3 bispecific antigen-binding molecule is preferably ≤5000 μM or ≤4000 μM (in particular when the target cells are CS1, BCMA, CD20, CD22, FLT3, CD123, CLL1, CHD3, MSLN, or EpCAM positive human cell lines), more preferably ≤2000 μM (in particular when the target cells are CS1, BCMA, CD20, CD22, FLT3, CD123, CLL1. CHD3, MSLN, or EpCAM transfected cells such as CHO cells), more preferably ≤1000 μM or ≤500 μM, even more preferably ≤200 μM, even more preferably ≤150 μM, even more preferably ≤100 μM, and most preferably ≤50 μM, or lower. When a macaque T cell line such as LnPx4119 is used as effector cells, and a macaque CS1, BCMA, CD20, CD22, FLT3, CD123, CLL1, CHD3, MSLN, or EpCAM transfected cell line such as CHO cells is used as target cell line, the EC₅₀ value of the CS1, BCMA, CD20, CD22, FLT3, CD123, CLL1, CHD3, MSLN, or EpCAMxCD3 bispecific antigen-binding molecule is preferably ≤2000 μM or ≤1500 μM, more preferably ≤1000 μM or ≤500 μM, even more preferably ≤300 μM or <250 μM, even more preferably ≤100 μM, and most preferably ≤50 μM.

[0292] Preferably, the CS1, BCMA, CD20, CD22, FLT3, CD123, CLL1, CHD3, MSLN, or EpCAMxCD3 bispecific antigen-binding molecules of the present invention do not induce/mediate lysis or do not essentially induce/mediate lysis of CS1, BCMA, CD20, CD22, FLT3, CD123, CLL1, CHD3, MSLN, or EpCAM negative cells such as CHO cells. The term “do not induce lysis”, “do not essentially induce lysis”, “do not mediate lysis” or “do not essentially mediate lysis” means that an antigen-binding molecule of the present invention does not induce or mediate lysis of more than 30%, preferably not more than 20%, more preferably not more than 10%, particularly preferably not more than 9%, 8%, 7%, 6% or 5% of CS1, BCMA, CD20, CD22, FLT3, CD123, CLL1, CHD3, MSLN, or EpCAM negative cells, whereby lysis of a CS1, BCMA, CD20, CD22, FLT3, CD123, CLL1, CHD3, MSLN, or EpCAM positive human cell line is set to be 100%. This usually applies for concentrations of the antigen-binding molecule of up to 500 nM. The skilled person knows how to measure cell lysis without further ado. Moreover, the present specification teaches specific instructions how to measure cell lysis.

[0293] The difference in cytotoxic activity between the monomeric and the dimeric isoform of individual CS1, BCMA, CD20, CD22, FLT3, CD123, CLL1, CHD3, MSLN, or EpCAMxCD3 bispecific antigen-binding molecules is referred to as “potency gap”. This potency gap can e.g. be calculated as ratio between EC₅₀ values of the molecule's monomeric and dimeric form. Potency gaps of the CS1, BCMA, CD20, CD22, FLT3, CD123, CLL1, CHD3, MSLN, or EpCAMxCD3 bispecific antigen-binding molecules of the present invention are preferably ≤5, more preferably ≤4, even more preferably ≤3, even more preferably ≤2 and most preferably ≤1.

[0294] The first, second, third and/or the fourth binding domain of the antigen-binding molecule of the invention is/are preferably cross-species specific for members of the mammalian order of primates. Cross-species specific CD3 binding domains are, for example, those described herein and in WO 2008/119567. According to one embodiment, the first and third binding domain, in addition to binding to human CS1, BCMA, CD20, CD22, FLT3, CD123, CLL1, CHD3, MSLN, or EpCAM and human CD3, respectively, will also bind to CS1, BCMA, CD20, CD22, FLT3, CD123, CLL1, CHD3, MSLN, or EpCAM/CD3 of primates including (but not limited to) new world primates (such as Callithrix jacchus, Saguinus Oedipus or Saimiri sciureus), old world primates (such baboons and macaques), gibbons, and non-human homininae.

[0295] In one embodiment of the antigen-binding molecule of the invention the first domain binds to human CS1, BCMA, CD20, CD22, FLT3, CD123, CLL1, CHD3, MSLN, or EpCAM and further binds to macaque CS1, BCMA, CD20, CD22, FLT3, CD123, CLL1, CHD3, MSLN, or EpCAM, such as CS1, BCMA, CD20, CD22, FLT3, CD123, CLL1, CHD3, MSLN, or EpCAM of Macaca fascicularis, and more preferably, to macaque CS1, BCMA, CD20, CD22, FLT3, CD123, CLL1. CHD3, MSLN, or EpCAM expressed on the surface of cells, e.g. such as CHO or 293 cells. The affinity of the first domain for CS1, BCMA, CD20, CD22, FLT3, CD123, CLL1, CHD3, MSLN, or EpCAM, preferably for human CS1, BCMA, CD20, CD22, FLT3, CD123, CLL1, CHD3, MSLN, or EpCAM, is preferably ≤100 nM or ≤50 nM, more preferably ≤25 nM or ≤20 nM, more preferably ≤15 nM or ≤10 nM, even more preferably ≤5 nM, even more preferably ≤2.5 nM or ≤2 nM, even more preferably ≤1 nM, even more preferably <0.6 nM, even more preferably ≤0.5 nM, and most preferably ≤0.4 nM. The affinity can be measured for example in a BIAcore assay or in a Scatchard assay. Other methods of determining the affinity are also well-known to the skilled person. The affinity of the first domain for macaque CS1, BCMA, CD20, CD22, FLT3, CD123, CLL1, CHD3, MSLN, or EpCAM is preferably ≤15 nM, more preferably ≤10 nM, even more preferably ≤5 nM, even more preferably ≤1 nM, even more preferably ≤0.5 nM, even more preferably ≤0.1 nM, and most preferably ≤0.05 nM or even ≤0.01 nM.

[0296] Preferably the affinity gap of the antigen-binding molecules according to the invention for binding macaque CS1, BCMA, CD20, CD22, FLT3, CD123, CLL1, CHD3, MSLN, or EpCAM versus human CS1, BCMA, CD20, CD22, FLT3, CD123, CLL1, CHD3, MSLN, or EpCAM [ma CS1, BCMA, CD20, CD22, FLT3, CD123, CLL1, CHD3, MSLN, or EpCAM: hu CS1, BCMA, CD20, CD22, FLT3, CD123, CLL1, CHD3, MSLN, or EpCAM (as determined e.g. by surface plasmon resonance analysis such as BiaCore™ or by Scatchard analysis) is <100, preferably <20, more preferably <15, further preferably <10, even more preferably <8, more preferably <6 and most preferably <2. Preferred ranges for the affinity gap of the antigen-binding molecules according to the invention for binding macaque CS1, BCMA, CD20, CD22, FLT3, CD123, CLL1, CHD3, MSLN, or EpCAM versus human CS1, BCMA, CD20, CD22, FLT3, CD123, CLL1, CHD3, MSLN, or EpCAM are between 0.1 and 20, more preferably between 0.2 and 10, even more preferably between 0.3 and 6, even more preferably between 0.5 and 3 or between 0.5 and 2.5, and most preferably between 0.5 and 2 or between 0.6 and 2.

[0297] The second and the fourth binding domain of the antigen-binding molecule of the invention typically binds to human CD3 epsilon and/or to Macaca CD3 epsilon. In a preferred embodiment, where a selectivity gap is achieved, the second and the fourth binding domain, or alternatively, the first and the third binding domain, further binds to Callithrix jacchus, Saguinus Oedipus or Saimiri sciureus CD3 epsilon. Callithrix jacchus and Saguinus oedipus are both new world primate belonging to the family of Callitrichidae, while Saimiri sciureus is a new world primate belonging to the family of Cebidae. Said binding domains may preferably selected form sequences identified herein as “I2L” (or synonymously “I2L0”). “12M” and “12M2”, more preferably as “12L” or “I2L0”.

[0298] It is preferred for the antigen-binding molecule of the present invention that the preferably second and fourth binding domain which binds to an extracellular epitope of the human and/or the Macaca CD3 epsilon chain comprises a VL region comprising CDR-L1, CDR-L2 and CDR-L3 selected from:
[0299] (a) VL region comprising CDR-L1, CDR-L2 and CDR-L3 selected from SEQ ID NOs 40 to 42, 48 to 50, 56 to 58, 64 to 66, 72 to 74 439 to 441, preferably 64 to 66
[0300] (b) CDR-L1 as depicted in SEQ ID NO: 27 of WO 2008/119567, CDR-L2 as depicted in SEQ ID NO: 28 of WO 2008/119567 and CDR-L3 as depicted in SEQ ID NO: 29 of WO 2008/119567;
[0301] (c) CDR-L1 as depicted in SEQ ID NO: 117 of WO 2008/119567, CDR-L2 as depicted in SEQ ID NO: 118 of WO 2008/119567 and CDR-L3 as depicted in SEQ ID NO: 119 of WO 2008/119567;
[0302] (d) CDR-L1 as depicted in SEQ ID NO: 153 of WO 2008/119567, CDR-L2 as depicted in SEQ ID NO: 154 of WO 2008/119567 and CDR-L3 as depicted in SEQ ID NO: 155 of WO 2008/119567; and
[0303] (e) VL region comprising CDR-L1, CDR-L2 and CDR-L3 of SEQ ID NOs 420 to 422.

[0304] In a furthermore preferred embodiment of the antigen-binding molecule of the present invention, the preferably second and fourth binding domain which binds to an extracellular epitope of the human and/or the Macaca CD3 epsilon chain comprises a VH region comprising CDR-H 1. CDR-H2 and CDR-H3 selected from:
[0305] (a) VH region comprising CDR-H1, CDR-H2 and CDR-H3 selected from SEQ ID NOs 37 to 39, 45 to 47, 53 to 55, 61 to 63, 69 to 71 and 436 to 438, preferably 61 to 63;
[0306] (b) CDR-H1 as depicted in SEQ ID NO: 12 of WO 2008/119567, CDR-H2 as depicted in SEQ ID NO: 13 of WO 2008/119567 and CDR-H3 as depicted in SEQ ID NO: 14 of WO 2008/119567;
[0307] (c) CDR-H1 as depicted in SEQ ID NO: 30 of WO 2008/119567, CDR-H2 as depicted in SEQ ID NO: 31 of WO 2008/119567 and CDR-H3 as depicted in SEQ ID NO: 32 of WO 2008/119567;
[0308] (d) CDR-H1 as depicted in SEQ ID NO: 48 of WO 2008/119567. CDR-H2 as depicted in SEQ ID NO: 49 of WO 2008/119567 and CDR-H3 as depicted in SEQ ID NO: 50 of WO 2008/119567;
[0309] (c) CDR-H1 as depicted in SEQ ID NO: 66 of WO 2008/119567, CDR-H2 as depicted in SEQ ID NO: 67 of WO 2008/119567 and CDR-H3 as depicted in SEQ ID NO: 68 of WO 2008/119567;
[0310] (f) CDR-H1 as depicted in SEQ ID NO: 84 of WO 2008/119567, CDR-H2 as depicted in SEQ ID NO: 85 of WO 2008/119567 and CDR-H3 as depicted in SEQ ID NO: 86 of WO 2008/119567;
[0311] (g) CDR-H1 as depicted in SEQ ID NO: 102 of WO 2008/119567. CDR-H2 as depicted in SEQ ID NO: 103 of WO 2008/119567 and CDR-H3 as depicted in SEQ ID NO: 104 of WO 2008/119567;
[0312] (h) CDR-H1 as depicted in SEQ ID NO: 120 of WO 2008/119567. CDR-H2 as depicted in SEQ ID NO: 121 of WO 2008/119567 and CDR-H3 as depicted in SEQ ID NO: 122 of WO 2008/119567;
[0313] (i) CDR-H1 as depicted in SEQ ID NO: 138 of WO 2008/119567, CDR-H2 as depicted in SEQ ID NO: 139 of WO 2008/119567 and CDR-H3 as depicted in SEQ ID NO: 140 of WO 2008/119567;
[0314] (j) CDR-H1 as depicted in SEQ ID NO: 156 of WO 2008/119567, CDR-H2 as depicted in SEQ ID NO: 157 of WO 2008/119567 and CDR-H3 as depicted in SEQ ID NO: 158 of WO 2008/119567;
[0315] (k) CDR-H1 as depicted in SEQ ID NO: 174 of WO 2008/119567, CDR-H2 as depicted in SEQ ID NO: 175 of WO 2008/119567 and CDR-H3 as depicted in SEQ ID NO: 176 of WO 2008/119567; and
[0316] (l) VH region comprising CDR-H 1, CDR-H2 and CDR-H3 of SEQ ID NOs 423 to 425.

[0317] In a preferred embodiment of the antigen-binding molecule of the invention the above described three groups of VL CDRs are combined with the above described ten groups of VH CDRs within the third binding domain to form (30) groups, each comprising CDR-L 1-3 and CDR-H 1-3.

[0318] It is preferred for the antigen-binding molecule of the present invention that the third domain which binds to CD3 comprises a VL region selected from the group consisting of those depicted in SEQ ID NOs: 17, 21, 35, 39, 53, 57, 71, 75, 89, 93, 107, 111, 125, 129, 143, 147, 161, 165, 179 or 183 of WO 2008/119567 or, preferably, as depicted in SEQ ID NO: 44, 52, 60, 68 and 76, preferably 68 according to the present invention.

[0319] It is also preferred that the third domain which binds to CD3 comprises a VH region selected from the group consisting of those depicted in SEQ ID NO: 15, 19, 33, 37, 51, 55, 69, 73, 87, 91, 105, 109, 123, 127, 141, 145, 159, 163, 177 or 181 of WO 2008/119567 or, preferably, as depicted in SEQ ID NO: SEQ ID NOs 43, 51, 59, 67 and 75, preferably 67 according to the present invention.

[0320] More preferably, the antigen-binding molecule of the present invention is characterized by a preferably second and fourth domain which binds to CD3 comprising a VL region and a VH region selected from the group consisting of:
[0321] (a) a VL region selected from SEQ ID NOs 44, 52, 60, 68, 76 and 443, and a VH region selected from SEQ ID NOs 43, 51, 59, 67, 75 and 442;
[0322] (b) a VL region as depicted in SEQ ID NO: 17 or 21 of WO 2008/119567 and a VH region as depicted in SEQ ID NO: 15 or 19 of WO 2008/119567;
[0323] (c) a VL region as depicted in SEQ ID NO: 35 or 39 of WO 2008/119567 and a VH region as depicted in SEQ ID NO: 33 or 37 of WO 2008/119567;
[0324] (d) a VL region as depicted in SEQ ID NO: 53 or 57 of WO 2008/119567 and a VH region as depicted in SEQ ID NO: 51 or 55 of WO 2008/119567;
[0325] (e) a VL region as depicted in SEQ ID NO: 71 or 75 of WO 2008/119567 and a VH region as depicted in SEQ ID NO: 69 or 73 of WO 2008/119567;
[0326] (f) a VL region as depicted in SEQ ID NO: 89 or 93 of WO 2008/119567 and a VH region as depicted in SEQ ID NO: 87 or 91 of WO 2008/119567;
[0327] (g) a VL region as depicted in SEQ ID NO: 107 or 111 of WO 2008/119567 and a VH region as depicted in SEQ ID NO: 105 or 109 of WO 2008/119567;
[0328] (h) a VL region as depicted in SEQ ID NO: 125 or 129 of WO 2008/119567 and a VH region as depicted in SEQ ID NO: 123 or 127 of WO 2008/119567;
[0329] (i) a VL region as depicted in SEQ ID NO: 143 or 147 of WO 2008/119567 and a VH region as depicted in SEQ ID NO: 141 or 145 of WO 2008/119567;
[0330] (j) a VL region as depicted in SEQ ID NO: 161 or 165 of WO 2008/119567 and a VH region as depicted in SEQ ID NO: 159 or 163 of WO 2008/119567; and
[0331] (k) a VL region as depicted in SEQ ID NO: 179 or 183 of WO 2008/119567 and a VH region as depicted in SEQ ID NO: 177 or 181 of WO 2008/119567.

[0332] Also preferred in connection with the antigen-binding molecule of the present invention is a second and forth domain which binds to CD3 comprising a VL region as depicted in SEQ ID NO: 68 and a VH region as depicted in SEQ ID NO: 67.

[0333] According to a preferred embodiment of the antigen-binding molecule of the present invention, the first and/or the third domain have the following format: The pairs of VH regions and VL regions are in the format of a single chain antibody (scFv). The VH and VL regions are arranged in the order VH-VL or VL-VH. It is preferred that the VH-region is positioned N-terminally of a linker sequence, and the VL-region is positioned C-terminally of the linker sequence.

[0334] The invention further provides an antigen-binding molecule comprising or having an amino acid sequence (full bispecific antigen-binding molecule) selected from the group consisting of any of 673, 676, 679, 682, 685, 688, 691, 694, 697, 700, 703, 706, 709, 712, 715, 718, 721, 724, 727, 730, 733, 736, 739, 742, 745, 748, 751, 754, 757, 760, 763, 766, 769, 772, 775, 778, 781, 784, 787, 790, 793, 796, 799, 802, 805, 808, 811, 814, 817, 820, 823, 826, 829, 832, 835, 838, 841, 844, 847, 850, 853, 856, 859, 862, 865, 868, 871, 1437, 1440, 1443, 1446, 1449, 1452, 1455, 1458, 1461, 1464, 1467, 1470, 1473, 1476, 1479, 1482, 1485, 1488, 1499, 1667, 1670, 1673, 1676, 1679, 1682, 1685, 1688, 1691, 1694, 1697, 1700, 1703, 1706, 1709, 1712, 1715, 1718, 1721, 1724, 1727, 1730, 1733, 1736, 1739, 1742, 1745, 1748, 1751, 1754, 1757, 1760, 1763, 1766, 1769, 1772, 1775, 1778, 1781, 1784, 1787, 1790, 1793, 1796, 1799, 1802, 1805, 1808, 1811, 1814, 1817, 1820, 1823, 1826, and 1829, preferably 1437, or having an amino acid sequence having at least 90, 91, 92, 93, 94 95, 96, 97, 98 or 99% identity to said sequences.

[0335] Covalent modifications of the antigen-binding molecules are also included within the scope of this invention, and are generally, but not always, done post-translationally. For example, several types of covalent modifications of the antigen-binding molecule are introduced into the molecule by reacting specific amino acid residues of the antigen-binding molecule with an organic derivatizing agent that is capable of reacting with selected side chains or the N- or C-terminal residues.

[0336] Cysteinyl residues most commonly are reacted with α-haloacetates (and corresponding amines), such as chloroacetic acid or chloroacetamide, to give carboxymethyl or carboxyamidomethyl derivatives. Cysteinyl residues also are derivatized by reaction with bromotrifluoroacetone, α-bromo-β-(5-imidozoyl)propionic acid, chloroacetyl phosphate, N-alkylmaleimides, 3-nitro-2-pyridyl disulfide, methyl 2-pyridyl disulfide, p-chloromercuribenzoate, 2-chloromercuri-4-nitrophenol, or chloro-7-nitrobenzo-2-oxa-1,3-diazole.

[0337] Histidyl residues are derivatized by reaction with diethylpyrocarbonate at pH 5.5-7.0 because this agent is relatively specific for the histidyl side chain. Para-bromophenacyl bromide also is useful; the reaction is preferably performed in 0.1 M sodium cacodylate at pH 6.0. Lysinyl and amino terminal residues are reacted with succinic or other carboxylic acid anhydrides. Derivatization with these agents has the effect of reversing the charge of the lysinyl residues. Other suitable reagents for derivatizing alpha-amino-containing residues include imidoesters such as methyl picolinimidate; pyridoxal phosphate; pyridoxal; chloroborohydride; trinitrobenzenesulfonic acid; O-methylisourea; 2,4-pentanedione; and transaminase-catalyzed reaction with glyoxylate.

[0338] Arginyl residues are modified by reaction with one or several conventional reagents, among them phenylglyoxal, 2,3-butanedione, 1,2-cyclohexanedione, and ninhydrin. Derivatization of arginine residues requires that the reaction be performed in alkaline conditions because of the high pKa of the guanidine functional group. Furthermore, these reagents may react with the groups of lysine as well as the arginine epsilon-amino group.

[0339] The specific modification of tyrosyl residues may be made, with particular interest in introducing spectral labels into tyrosyl residues by reaction with aromatic diazonium compounds or tetranitromethane. Most commonly, N-acetylimidizole and tetranitromethane are used to form O-acetyl tyrosyl species and 3-nitro derivatives, respectively. Tyrosyl residues are iodinated using ¹²⁵I or ¹³¹I to prepare labeled proteins for use in radioimmunoassay, the chloramine T method described above being suitable.

[0340] Carboxyl side groups (aspartyl or glutamyl) are selectively modified by reaction with carbodiimides (R′—N═C═N—R′), where R and R′ are optionally different alkyl groups, such as 1-cyclohexyl-3-(2-morpholinyl-4-ethyl) carbodiimide or 1-ethyl-3-(4-azonia-4,4-dimethylpentyl) carbodiimide. Furthermore, aspartyl and glutamyl residues are converted to asparaginyl and glutaminyl residues by reaction with ammonium ions.

[0341] Derivatization with bifunctional agents is useful for crosslinking the antigen-binding molecules of the present invention to a water-insoluble support matrix or surface for use in a variety of methods. Commonly used crosslinking agents include, e.g., 1,1-bis(diazoacetyl)-2-phenylethane, glutaraldehyde, N-hydroxysuccinimide esters, for example, esters with 4-azidosalicylic acid, homobifunctional imidoesters, including disuccinimidyl esters such as 3,3′-dithiobis(succinimidylpropionate), and bifunctional maleimides such as bis-N-maleimido-1,8-octane. Derivatizing agents such as methyl-3-[(p-azidophenyl)dithio]propioimidate yield photoactivatable intermediates that are capable of forming crosslinks in the presence of light. Alternatively, reactive water-insoluble matrices such as cyanogen bromide-activated carbohydrates and the reactive substrates as described in U.S. Pat. Nos. 3,969,287; 3,691,016; 4,195,128; 4,247,642; 4,229,537; and 4,330,440 are employed for protein immobilization.

[0342] Glutaminyl and asparaginyl residues are frequently deamidated to the corresponding glutamyl and aspartyl residues, respectively. Alternatively, these residues are deamidated under mildly acidic conditions. Either form of these residues falls within the scope of this invention.

[0343] Other modifications include hydroxylation of proline and lysine, phosphorylation of hydroxyl groups of seryl or threonyl residues, methylation of the α-amino groups of lysine, arginine, and histidine side chains (T. E. Creighton, Proteins: Structure and Molecular Properties, W. H. Freeman & Co., San Francisco, 1983, pp. 79-86), acetylation of the N-terminal amine, and amidation of any C-terminal carboxyl group.

[0344] Another type of covalent modification of the antigen-binding molecules included within the scope of this invention comprises altering the glycosylation pattern of the protein. As is known in the art, glycosylation patterns can depend on both the sequence of the protein (e.g., the presence or absence of particular glycosylation amino acid residues, discussed below), or the host cell or organism in which the protein is produced. Particular expression systems are discussed below.

[0345] Glycosylation of polypeptides is typically either N-linked or O-linked. N-linked refers to the attachment of the carbohydrate moiety to the side chain of an asparagine residue. The tri-peptide sequences asparagine-X-serine and asparagine-X-threonine, where X is any amino acid except proline, are the recognition sequences for enzymatic attachment of the carbohydrate moiety to the asparagine side chain. Thus, the presence of either of these tri-peptide sequences in a polypeptide creates a potential glycosylation site. O-linked glycosylation refers to the attachment of one of the sugars N-acetylgalactosamine, galactose, or xylose, to a hydroxyamino acid, most commonly serine or threonine, although 5-hydroxyproline or 5-hydroxylysine may also be used.

[0346] Addition of glycosylation sites to the antigen-binding molecule is conveniently accomplished by altering the amino acid sequence such that it contains one or more of the above-described tri-peptide sequences (for N-linked glycosylation sites). The alteration may also be made by the addition of, or substitution by, one or more serine or threonine residues to the starting sequence (for O-linked glycosylation sites). For case, the amino acid sequence of an antigen-binding molecule is preferably altered through changes at the DNA level, particularly by mutating the DNA encoding the polypeptide at preselected bases such that codons are generated that will translate into the desired amino acids.

[0347] Another means of increasing the number of carbohydrate moieties on the antigen-binding molecule is by chemical or enzymatic coupling of glycosides to the protein. These procedures are advantageous in that they do not require production of the protein in a host cell that has glycosylation capabilities for N- and O-linked glycosylation. Depending on the coupling mode used, the sugar(s) may be attached to (a) arginine and histidine, (b) free carboxyl groups, (c) free sulfhydryl groups such as those of cysteine. (d) free hydroxyl groups such as those of serine, threonine, or hydroxyproline, (e) aromatic residues such as those of phenylalanine, tyrosine, or tryptophan, or (f) the amide group of glutamine. These methods are described in WO 87/05330, and in Aplin and Wriston, 1981, CRC Crit. Rev. Biochem., pp. 259-306.

[0348] Removal of carbohydrate moieties present on the starting antigen-binding molecule may be accomplished chemically or enzymatically. Chemical deglycosylation requires exposure of the protein to the compound trifluoromethanesulfonic acid, or an equivalent compound. This treatment results in the cleavage of most or all sugars except the linking sugar (N-acetylglucosamine or N-acetylgalactosamine), while leaving the polypeptide intact. Chemical deglycosylation is described by Hakimuddin et al., 1987, Arch. Biochem. Biophys. 259:52 and by Edge et al., 1981, Anal. Biochem. 118:131. Enzymatic cleavage of carbohydrate moieties on polypeptides can be achieved by the use of a variety of endo- and exo-glycosidases as described by Thotakura et al., 1987, Meth. Enzymol. 138:350. Glycosylation at potential glycosylation sites may be prevented by the use of the compound tunicamycin as described by Duskin et al., 1982, J. Biol. Chem. 257:3105. Tunicamycin blocks the formation of protein-N-glycoside linkages.

[0349] Other modifications of the antigen-binding molecule are also contemplated herein. For example, another type of covalent modification of the antigen-binding molecule comprises linking the antigen-binding molecule to various non-proteinaceous polymers, including, but not limited to, various polyols such as polyethylene glycol, polypropylene glycol, polyoxyalkylenes, or copolymers of polyethylene glycol and polypropylene glycol, in the manner set forth in U.S. Pat. Nos. 4,640,835; 4,496,689; 4,301,144; 4,670,417; 4,791,192 or 4,179,337. In addition, as is known in the art, amino acid substitutions may be made in various positions within the antigen-binding molecule, e.g. in order to facilitate the addition of polymers such as PEG.

[0350] In some embodiments, the covalent modification of the antigen-binding molecules of the invention comprises the addition of one or more labels. The labelling group may be coupled to the antigen-binding molecule via spacer arms of various lengths to reduce potential steric hindrance. Various methods for labelling proteins are known in the art and can be used in performing the present invention. The term “label” or “labelling group” refers to any detectable label. In general, labels fall into a variety of classes, depending on the assay in which they are to be detected—the following examples include, but are not limited to:
[0351] a) isotopic labels, which may be radioactive or heavy isotopes, such as radioisotopes or radionuclides (e.g., ³H, ¹⁴C, ¹⁵N, ³⁵S, ⁸⁹Zr, ⁹⁰Y, ⁹⁹Tc, ¹¹¹In, ¹²⁵I, ¹³¹I)
[0352] b) magnetic labels (e.g., magnetic particles)
[0353] c) redox active moieties
[0354] d) optical dyes (including, but not limited to, chromophores, phosphors and fluorophores) such as fluorescent groups (e.g., FITC, rhodamine, lanthanide phosphors), chemiluminescent groups, and fluorophores which can be either “small molecule” fluors or proteinaceous fluors
[0355] e) enzymatic groups (e.g. horseradish peroxidase, β-galactosidase, luciferase, alkaline phosphatase)
[0356] f) biotinylated groups
[0357] g) predetermined polypeptide epitopes recognized by a secondary reporter (e.g., leucine zipper pair sequences, binding sides for secondary antibodies, metal binding domains, epitope tags, etc.)

[0358] By “fluorescent label” is meant any molecule that may be detected via its inherent fluorescent properties. Suitable fluorescent labels include, but are not limited to, fluorescein, rhodamine, tetramethylrhodamine, cosin, erythrosin, coumarin, methyl-coumarins, pyrene, Malacite green, stilbene, Lucifer Yellow, Cascade BlueJ, Texas Red, IAEDANS, EDANS, BODIPY FL, LC Red 640, Cy 5, Cy 5.5. LC Red 705, Oregon green, the Alexa-Fluor dyes (Alexa Fluor 350, Alexa Fluor 430, Alexa Fluor 488, Alexa Fluor 546, Alexa Fluor 568, Alexa Fluor 594, Alexa Fluor 633, Alexa Fluor 660, Alexa Fluor 680), Cascade Blue, Cascade Yellow and R-phycoerythrin (PE) (Molecular Probes, Eugene, OR), FITC, Rhodamine, and Texas Red (Pierce, Rockford, IL), Cy5, Cy5.5, Cy7 (Amersham Life Science, Pittsburgh, PA). Suitable optical dyes, including fluorophores, are described in Molecular Probes Handbook by Richard P. Haugland.

[0359] Suitable proteinaceous fluorescent labels also include, but are not limited to, green fluorescent protein, including a Renilla, Ptilosarcus, or Aequorea species of GFP (Chalfie et al., 1994, Science 263:802-805), EGFP (Clontech Laboratories, Inc., Genbank Accession Number U55762), blue fluorescent protein (BFP, Quantum Biotechnologies, Inc. 1801 de Maisonneuve Blvd. West, 8th Floor, Montreal, Quebec, Canada H3H 1J9; Stauber, 1998, Biotechniques 24:462-471; Heim et al., 1996, Curr. Biol. 6:178-182), enhanced yellow fluorescent protein (EYFP, Clontech Laboratories, Inc.), luciferase (Ichiki et al., 1993, J. Immunol. 150:5408-5417), β galactosidase (Nolan et al., 1988, Proc. Natl. Acad. Sci. U.S.A. 85:2603-2607) and Renilla (WO92/15673, WO95/07463, WO98/14605, WO98/26277, WO99/49019, U.S. Pat. Nos. 5,292,658; 5,418,155; 5,683,888; 5,741,668; 5,777,079; 5,804.387; 5,874.304; 5,876,995; 5,925,558).

[0360] The antigen-binding molecule of the invention may also comprise additional domains, which are e.g. helpful in the isolation of the molecule or relate to an adapted pharmacokinetic profile of the molecule. Domains helpful for the isolation of an antigen-binding molecule may be selected from peptide motives or secondarily introduced moieties, which can be captured in an isolation method, e.g. an isolation column. Non-limiting embodiments of such additional domains comprise peptide motives known as Myc-tag, HAT-tag, HA-tag, TAP-tag, GST-tag, chitin binding domain (CBD-tag), maltose binding protein (MBP-tag), Flag-tag, Strep-tag and variants thereof (e.g. StrepII-tag) and His-tag. All herein disclosed antigen-binding molecules may comprise a His-tag domain, which is generally known as a repeat of consecutive His residues in the amino acid sequence of a molecule, preferably of five, and more preferably of six His residues (hexa-histidine). The His-tag may be located e.g. at the N- or C-terminus of the antigen-binding molecule, preferably it is located at the C-terminus. Most preferably, a hexa-histidine tag (HHHHHH) (SEQ ID NO:16) is linked via peptide bond to the C-terminus of the antigen-binding molecule according to the invention. Additionally, a conjugate system of PLGA-PEG-PLGA may be combined with a poly-histidine tag for sustained release application and improved pharmacokinetic profile.

[0361] Amino acid sequence modifications of the antigen-binding molecules described herein are also contemplated. For example, it may be desirable to improve the binding affinity and/or other biological properties of the antigen-binding molecule. Amino acid sequence variants of the antigen-binding molecules are prepared by introducing appropriate nucleotide changes into the antigen-binding molecules nucleic acid, or by peptide synthesis. All of the below described amino acid sequence modifications should result in an antigen-binding molecule which still retains the desired biological activity (binding to CS1, BCMA, CD20, CD22, FLT3, CD123, CLL1, CHD3, MSLN, or EpCAM and to CD3) of the unmodified parental molecule.

[0362] The term “amino acid” or “amino acid residue” typically refers to an amino acid having its art recognized definition such as an amino acid selected from the group consisting of: alanine (Ala or A); arginine (Arg or R); asparagine (Asn or N); aspartic acid (Asp or D); cysteine (Cys or C); glutamine (GIn or Q); glutamic acid (Glu or E); glycine (Gly or G); histidine (His or H); isoleucine (He or I); leucine (Leu or L); lysine (Lys or K); methionine (Met or M); phenylalanine (Phe or F); pro line (Pro or P); serine (Ser or S); threonine (Thr or T); tryptophan (Trp or W); tyrosine (Tyr or Y); and valine (Val or V), although modified, synthetic, or rare amino acids may be used as desired. Generally, amino acids can be grouped as having a nonpolar side chain (e.g., Ala, Cys, He, Leu, Met, Phe, Pro, Val); a negatively charged side chain (e.g., Asp, Glu); a positively charged sidechain (e.g., Arg, His, Lys); or an uncharged polar side chain (e.g., Asn, Cys, Gln, Gly, His, Met, Phe, Ser, Thr, Trp, and Tyr).

[0363] Amino acid modifications include, for example, deletions from, and/or insertions into, and/or substitutions of, residues within the amino acid sequences of the antigen-binding molecules. Any combination of deletion, insertion, and substitution is made to arrive at the final construct, provided that the final construct possesses the desired characteristics. The amino acid changes also may alter post-translational processes of the antigen-binding molecules, such as changing the number or position of glycosylation sites.

[0364] For example, 1, 2, 3, 4, 5, or 6 amino acids may be inserted, substituted or deleted in each of the CDRs (of course, dependent on their length), while 1, 2, 3, 4, 5, 6, 7, 8, 9, 10, 11, 12, 13, 14, 15, 16, 17, 18, 19, 20, or 25 amino acids may be inserted, substituted or deleted in each of the FRs. Preferably, amino acid sequence insertions into the antigen-binding molecule include amino- and/or carboxyl-terminal fusions ranging in length from 1, 2, 3, 4, 5, 6, 7, 8, 9 or 10 residues to polypeptides containing a hundred or more residues, as well as intra-sequence insertions of single or multiple amino acid residues. An insertional variant of the antigen-binding molecule of the invention includes the fusion to the N-terminus or to the C-terminus of the antigen-binding molecule of an enzyme or the fusion to a polypeptide.

[0365] The sites of greatest interest for substitutional mutagenesis include (but are not limited to) the CDRs of the heavy and/or light chain, in particular the hypervariable regions, but FR alterations in the heavy and/or light chain are also contemplated. The substitutions are preferably conservative substitutions as described herein. Preferably, 1, 2, 3, 4, 5, 6, 7, 8, 9, or 10 amino acids may be substituted in a CDR, while 1, 2, 3, 4, 5, 6, 7, 8, 9, 10, 11, 12, 13, 14, 15, 16, 17, 18, 19, 20, or 25 amino acids may be substituted in the framework regions (FRs), depending on the length of the CDR or FR. For example, if a CDR sequence encompasses 6 amino acids, it is envisaged that one, two or three of these amino acids are substituted. Similarly, if a CDR sequence encompasses 15 amino acids it is envisaged that one, two, three, four, five or six of these amino acids are substituted.

[0366] A useful method for identification of certain residues or regions of the antigen-binding molecules that are preferred locations for mutagenesis is called “alanine scanning mutagenesis” as described by Cunningham and Wells in Science, 244: 1081-1085 (1989). Here, a residue or group of target residues within the antigen-binding molecule is/are identified (e.g. charged residues such as arg, asp, his, lys, and glu) and replaced by a neutral or negatively charged amino acid (most preferably alanine or polyalanine) to affect the interaction of the amino acids with the epitope.

[0367] Those amino acid locations demonstrating functional sensitivity to the substitutions are then refined by introducing further or other variants at, or for, the sites of substitution. Thus, while the site or region for introducing an amino acid sequence variation is predetermined, the nature of the mutation per se needs not to be predetermined. For example, to analyze or optimize the performance of a mutation at a given site, alanine scanning or random mutagenesis may be conducted at a target codon or region, and the expressed antigen-binding molecule variants are screened for the optimal combination of desired activity. Techniques for making substitution mutations at predetermined sites in the DNA having a known sequence are well known, for example, M13 primer mutagenesis and PCR mutagenesis. Screening of the mutants is done using assays of antigen binding activities, such as CS1, BCMA, CD20, CD22, FLT3, CD123, CLL1, CHD3, MSLN, or EpCAM or CD3 binding.

[0368] Generally, if amino acids are substituted in one or more or all of the CDRs of the heavy and/or light chain, it is preferred that the then-obtained “substituted” sequence is at least 60% or 65%, more preferably 70% or 75%, even more preferably 80% or 85%, and particularly preferably 90% or 95% identical to the “original” CDR sequence. This means that it is dependent of the length of the CDR to which degree it is identical to the “substituted” sequence. For example, a CDR having 5 amino acids is preferably 80% identical to its substituted sequence in order to have at least one amino acid substituted. Accordingly, the CDRs of the antigen-binding molecule may have different degrees of identity to their substituted sequences, e.g., CDRL1 may have 80%, while CDRL3 may have 90%.

[0369] Preferred substitutions (or replacements) are conservative substitutions. However, any substitution (including non-conservative substitution or one or more from the “exemplary substitutions” listed in Table 3, below) is envisaged as long as the antigen-binding molecule retains its capability to bind to CS1, BCMA, CD20, CD22, FLT3, CD123, CLL1, CHD3, MSLN, or EpCAM via the first domain and to CD3 epsilon via the second domain and/or its CDRs have an identity to the then substituted sequence (at least 60% or 65%, more preferably 70% or 75%, even more preferably 80% or 85%, and particularly preferably 90% or 95% identical to the “original” CDR sequence).

[0370] Conservative substitutions are shown in Table 3 under the heading of “preferred substitutions”. If such substitutions result in a change in biological activity, then more substantial changes, denominated “exemplary substitutions” in Table 3, or as further described below in reference to amino acid classes, may be introduced and the products screened for a desired characteristic.

TABLE 3
Amino acid substitutions

| | | Preferred |
|---|---|---|
| Original | Exemplary Substitutions | Substitutions |
| Ala (A) | val, leu, ile | Val |
| Arg (R) | lys, gln, asn | Lys |
| Asn (N) | gln, his, asp, lys, arg | Gln |
| Asp (D) | glu, asn | Glu |
| Cys (C) | ser, ala | ser |
| Gln (Q) | asn, glu | asn |
| Glu (E) | asp, gln | asp |
| Gly (G) | Ala | ala |
| His (H) | asn, gln, lys, arg | arg |
| Ile (I) | leu, val, met, ala, phe | leu |
| Leu (L) | norleucine, ile, val, met, ala | ile |
| Lys (K) | arg, gln, asn | arg |
| Met (M) | leu, phe, ile | leu |
| Phe (F) | leu, val, ile, ala, tyr | tyr |
| Pro (P) | Ala | ala |
| Ser (S) | Thr | thr |
| Thr (T) | Ser | ser |
| Trp (W) | tyr, phe | tyr |
| Tyr (Y) | trp, phe, thr, ser | phe |
| Val (V) | ile, leu, met, phe, ala | leu |

[0371] Substantial modifications in the biological properties of the antigen-binding molecule of the present invention are accomplished by selecting substitutions that differ significantly in their effect on maintaining (a) the structure of the polypeptide backbone in the area of the substitution, for example, as a sheet or helical conformation, (b) the charge or hydrophobicity of the molecule at the target site, or (c) the bulk of the side chain. Naturally occurring residues are divided into groups based on common side-chain properties: (1) hydrophobic: norleucine, met, ala, val, leu, ile; (2) neutral hydrophilic: cys, ser, thr; asn, gln (3) acidic: asp, glu; (4) basic: his, lys, arg; (5) residues that influence chain orientation: gly, pro; and (6) aromatic: trp, tyr, phe.

[0372] Non-conservative substitutions will entail exchanging a member of one of these classes for another class. Any cysteine residue not involved in maintaining the proper conformation of the antigen-binding molecule may be substituted, generally with serine, to improve the oxidative stability of the molecule and prevent aberrant crosslinking. Conversely, cysteine bond(s) may be added to the antibody to improve its stability (particularly where the antibody is an antibody fragment such as an Fv fragment).

[0373] For amino acid sequences, sequence identity and/or similarity is determined by using standard techniques known in the art, including, but not limited to, the local sequence identity algorithm of Smith and Waterman, 1981, Adv. Appl. Math. 2:482, the sequence identity alignment algorithm of Needleman and Wunsch, 1970, J. Mol. Biol. 48:443, the search for similarity method of Pearson and Lipman, 1988, Proc. Nat. Acad. Sci. U.S.A. 85:2444, computerized implementations of these algorithms (GAP, BESTFIT, FASTA, and TFASTA in the Wisconsin Genetics Software Package, Genetics Computer Group, 575 Science Drive, Madison, Wis.), the Best Fit sequence program described by Devereux et al., 1984, Nucl. Acid Res. 12:387-395, preferably using the default settings, or by inspection. Preferably, percent identity is calculated by FastDB based upon the following parameters: mismatch penalty of 1; gap penalty of 1; gap size penalty of 0.33; and joining penalty of 30, “Current Methods in Sequence Comparison and Analysis,” Macromolecule Sequencing and Synthesis, Selected Methods and Applications, pp 127-149 (1988), Alan R. Liss, Inc.

[0374] An example of a useful algorithm is PILEUP. PILEUP creates a multiple sequence alignment from a group of related sequences using progressive, pairwise alignments. It can also plot a tree showing the clustering relationships used to create the alignment. PILEUP uses a simplification of the progressive alignment method of Feng & Doolittle, 1987, J. Mol. Evol. 35:351-360; the method is similar to that described by Higgins and Sharp, 1989, CABIOS 5:151-153. Useful PILEUP parameters including a default gap weight of 3.00, a default gap length weight of 0.10, and weighted end gaps.

[0375] Another example of a useful algorithm is the BLAST algorithm, described in: Altschul et al., 1990, J. Mol. Biol. 215:403-410; Altschul et al., 1997, Nucleic Acids Res. 25:3389-3402; and Karin et al., 1993, Proc. Natl. Acad. Sci. U.S.A. 90:5873-5787. A particularly useful BLAST program is the WU-BLAST-2 program which was obtained from Altschul et al., 1996, Methods in Enzymology 266:460-480. WU-BLAST-2 uses several search parameters, most of which are set to the default values. The adjustable parameters are set with the following values: overlap span=1, overlap fraction=0.125, word threshold (T)=II. The HSP S and HSP S2 parameters are dynamic values and are established by the program itself depending upon the composition of the particular sequence and composition of the particular database against which the sequence of interest is being searched; however, the values may be adjusted to increase sensitivity.

[0376] An additional useful algorithm is gapped BLAST as reported by Altschul et al., 1993, Nucl. Acids Res. 25:3389-3402. Gapped BLAST uses BLOSUM-62 substitution scores; threshold T parameter set to 9; the two-hit method to trigger ungapped extensions, charges gap lengths of k a cost of 10+k; Xu set to 16, and Xg set to 40 for database search stage and to 67 for the output stage of the algorithms. Gapped alignments are triggered by a score corresponding to about 22 bits.

[0377] Generally, the amino acid homology, similarity, or identity between individual variant CDRs or VH/VL sequences are at least 60% to the sequences depicted herein, and more typically with preferably increasing homologies or identities of at least 65% or 70%, more preferably at least 75% or 80%, even more preferably at least 85%, 90%, 91%, 92%, 93%, 94%, 95%, 96%, 97%, 98%, 99%, and almost 100%. In a similar manner, “percent (%) nucleic acid sequence identity” with respect to the nucleic acid sequence of the binding proteins identified herein is defined as the percentage of nucleotide residues in a candidate sequence that are identical with the nucleotide residues in the coding sequence of the antigen-binding molecule. A specific method utilizes the BLASTN module of WU-BLAST-2 set to the default parameters, with overlap span and overlap fraction set to 1 and 0.125, respectively.

[0378] Generally, the nucleic acid sequence homology, similarity, or identity between the nucleotide sequences encoding individual variant CDRs or VH/VL sequences and the nucleotide sequences depicted herein are at least 60%, and more typically with preferably increasing homologies or identities of at least 65%, 70%, 75%, 80%, 81%, 82%, 83%, 84%, 85%, 86%, 87%, 88%, 89%, 90%, 91%, 92%, 93%, 94%, 95%, 96%, 97%, 98%, or 99%, and almost 100%. Thus, a “variant CDR” or a “variant VH/VL region” is one with the specified homology, similarity, or identity to the parent CDR/VH/VL of the invention, and shares biological function, including, but not limited to, at least 60%, 65%, 70%, 75%, 80%, 81%, 82%, 83%, 84%, 85%, 86%, 87%, 88%, 89%, 90%, 91%, 92%, 93%, 94%, 95%, 96%, 97%, 98%, or 99% of the specificity and/or activity of the parent CDR or VH/VL.

[0379] In one embodiment, the percentage of identity to human germline of the antigen-binding molecules according to the invention is ≥70% or ≥75%, more preferably ≥80% or ≥85%, even more preferably >90%, and most preferably ≥91%, ≥92%, ≥93%, ≥94%, ≥95% or even ≥96%. Identity to human antibody germline gene products is thought to be an important feature to reduce the risk of therapeutic proteins to elicit an immune response against the drug in the patient during treatment. Hwang & Foote (“Immunogenicity of engineered antibodies”; Methods 36 (2005) 3-10) demonstrate that the reduction of non-human portions of drug antigen-binding molecules leads to a decrease of risk to induce anti-drug antibodies in the patients during treatment. By comparing an exhaustive number of clinically evaluated antibody drugs and the respective immunogenicity data, the trend is shown that humanization of the V-regions of antibodies makes the protein less immunogenic (average 5.1% of patients) than antibodies carrying unaltered non-human V regions (average 23.59% of patients). A higher degree of identity to human sequences is hence desirable for V-region based protein therapeutics in the form of antigen-binding molecules. For this purpose of determining the germline identity, the V-regions of VL can be aligned with the amino acid sequences of human germline V segments and J segments (http://vbase.mrc-cpe.cam.ac.uk/) using Vector NTI software and the amino acid sequence calculated by dividing the identical amino acid residues by the total number of amino acid residues of the VL in percent. The same can be for the VH segments (http://vbase.mrc-cpe.cam.ac.uk/) with the exception that the VH CDR3 may be excluded due to its high diversity and a lack of existing human germline VH CDR3 alignment partners. Recombinant techniques can then be used to increase sequence identity to human antibody germline genes.

[0380] In a further embodiment, the bispecific antigen-binding molecules of the present invention exhibit high monomer yields under standard research scale conditions, e.g., in a standard two-step purification process. Preferably the monomer yield of the antigen-binding molecules according to the invention is >0.25 mg/L supernatant, more preferably ≥0.5 mg/L, even more preferably ≥1 mg/L, and most preferably ≥3 mg/L supernatant.

[0381] Likewise, the yield of the dimeric antigen-binding molecule isoforms and hence the monomer percentage (i.e., monomer: (monomer+dimer)) of the antigen-binding molecules can be determined. The productivity of monomeric and dimeric antigen-binding molecules and the calculated monomer percentage can e.g. be obtained in the SEC purification step of culture supernatant from standardized research-scale production in roller bottles. In one embodiment, the monomer percentage of the antigen-binding molecules is ≥80%, more preferably ≥85%, even more preferably ≥90%, and most preferably ≥95%.

[0382] In one embodiment, the antigen-binding molecules have a preferred plasma stability (ratio of EC50 with plasma to EC50 w/o plasma) of ≤5 or ≤4, more preferably ≤3.5 or ≤ 3, even more preferably ≤2.5 or ≤2, and most preferably ≤1.5 or ≤1. The plasma stability of an antigen-binding molecule can be tested by incubation of the construct in human plasma at 37° C. for 24 hours followed by EC50 determination in a ⁵¹chromium release cytotoxicity assay. The effector cells in the cytotoxicity assay can be stimulated enriched human CD8 positive T cells. Target cells can e.g. be CHO cells transfected with human CS1, BCMA, CD20, CD22, FLT3, CD123, CLL1, CHD3, MSLN, or EpCAM. The effector to target cell (E:T) ratio can be chosen as 10:1 or 5:1. The human plasma pool used for this purpose is derived from the blood of healthy donors collected by EDTA coated syringes. Cellular components are removed by centrifugation and the upper plasma phase is collected and subsequently pooled. As control, antigen-binding molecules are diluted immediately prior to the cytotoxicity assay in RPMI-1640 medium. The plasma stability is calculated as ratio of EC50 (after plasma incubation) to EC50 (control).

[0383] It is furthermore preferred that the monomer to dimer conversion of antigen-binding molecules of the invention is low. The conversion can be measured under different conditions and analyzed by high performance size exclusion chromatography. For example, incubation of the monomeric isoforms of the antigen-binding molecules can be carried out for 7 days at 37° C. and concentrations of e.g. 100 μg/ml or 250 μg/ml in an incubator. Under these conditions, it is preferred that the antigen-binding molecules of the invention show a dimer percentage that is <5%, more preferably <4%, even more preferably ≤3%, even more preferably <2.5%, even more preferably ≤2%, even more preferably ≤1.5%, and most preferably ≤1% or ≤0.5% or even 0%.

[0384] It is also preferred that the bispecific antigen-binding molecules of the present invention present with very low dimer conversion after a number of freeze/thaw cycles. For example, the antigen-binding molecule monomer is adjusted to a concentration of 250 μg/ml e.g. in generic formulation buffer and subjected to three freeze/thaw cycles (freezing at −80° C. for 30 min followed by thawing for 30 min at room temperature), followed by high performance SEC to determine the percentage of initially monomeric antigen-binding molecule, which had been converted into dimeric antigen-binding molecule. Preferably the dimer percentages of the bispecific antigen-binding molecules are ≤5%, more preferably <4%, even more preferably ≤3%, even more preferably ≤2.5%, even more preferably ≤2%, even more preferably ≤1.5%, and most preferably ≤1% or even ≤0.5%, for example after three freeze/thaw cycles.

[0385] The bispecific antigen-binding molecules of the present invention preferably show a favorable thermostability with aggregation temperatures ≥45° C. or ≥50° C., more preferably ≥52° C. or ≥54° C., even more preferably ≥56° C. or ≥57° C., and most preferably ≥58° C. or ≥59° C. The thermostability parameter can be determined in terms of antibody aggregation temperature as follows: Antibody solution at a concentration 250 μg/ml is transferred into a single use cuvette and placed in a Dynamic Light Scattering (DLS) device. The sample is heated from 40° C. to 70° ° C. at a heating rate of 0.5° C./min with constant acquisition of the measured radius. Increase of radius indicating melting of the protein and aggregation is used to calculate the aggregation temperature of the antibody.

[0386] Alternatively, temperature melting curves can be determined by Differential Scanning calorimetry (DSC) to determine intrinsic biophysical protein stabilities of the antigen-binding molecules. These experiments are performed using a MicroCal LLC (Northampton, MA, U.S.A) VP-DSC device. The energy uptake of a sample containing an antigen-binding molecule is recorded from 20° ° C. to 90° C. compared to a sample containing only the formulation buffer. The antigen-binding molecules are adjusted to a final concentration of 250 μg/ml e.g. in SEC running buffer. For recording of the respective melting curve, the overall sample temperature is increased stepwise. At each temperature T energy uptake of the sample and the formulation buffer reference is recorded. The difference in energy uptake Cp (kcal/mole/° C.) of the sample minus the reference is plotted against the respective temperature. The melting temperature is defined as the temperature at the first maximum of energy uptake.

[0387] The CS1, BCMA, CD20, CD22, FLT3, CD123, CLL1, CHD3, MSLN, or EpCAMxCD3 bispecific antigen-binding molecules of the invention are also envisaged to have a turbidity (as measured by OD340 after concentration of purified monomeric antigen-binding molecule to 2.5 mg/ml and overnight incubation) of ≤0.2, preferably of ≤0.15, more preferably of ≤0.12, even more preferably of ≤0.1, and most preferably of ≤0.08.

[0388] In a further embodiment the antigen-binding molecule according to the invention is stable at physiologic or slightly lower pH, i.e. about pH 7.4 to 6.0. The more tolerant the antigen-binding molecule behaves at unphysiologic pH such as about pH 6.0, the higher is the recovery of the antigen-binding molecule eluted from an ion exchange column relative to the total amount of loaded protein. Recovery of the antigen-binding molecule from an ion (e.g., cation) exchange column at about pH 6.0 is preferably ≥30%, more preferably ≥40%, more preferably ≥50%, even more preferably ≥60%, even more preferably ≥70%, even more preferably ≥80%, even more preferably ≥90%, even more preferably ≥95%, and most preferably ≥99%.

[0389] It is furthermore envisaged that the bispecific antigen-binding molecules of the present invention exhibit therapeutic efficacy or anti-tumor activity. This can e.g. be assessed in a study as disclosed in the following generalized example of an advanced stage human tumor xenograft model:

[0390] On day 1 of the study, 5×10⁶ cells of a human target cell antigen (here: CS1, BCMA, CD20, CD22, FLT3, CD123, CLL1, CHD3, MSLN, or EpCAM) positive cancer cell line are subcutaneously injected in the right dorsal flank of female NOD/SCID mice. When the mean tumor volume reaches about 100 mm3, in vitro expanded human CD3 positive T cells are transplanted into the mice by injection of about 2×10⁷ cells into the peritoneal cavity of the animals. Mice of vehicle control group 1 do not receive effector cells and are used as an untransplanted control for comparison with vehicle control group 2 (receiving effector cells) to monitor the impact of T cells alone on tumor growth. The treatment with a bispecific antigen-binding molecule starts when the mean tumor volume reaches about 200 mm³. The mean tumor size of each treatment group on the day of treatment start should not be statistically different from any other group (analysis of variance). Mice are treated with 0.5 mg/kg/day of a CS1, BCMA, CD20, CD22, FLT3, CD123, CLL1, CHD3, MSLN, or EpCAM and CD3 bispecific antigen-binding molecule by intravenous bolus injection for about 15 to 20 days. Tumors are measured by caliper during the study and progress evaluated by intergroup comparison of tumor volumes (TV). The tumor growth inhibition T/C [%] is determined by calculating TV as T/C %=100×(median TV of analyzed group)/(median TV of control group 2).

[0391] The skilled person knows how to modify or adapt certain parameters of this study, such as the number of injected tumor cells, the site of injection, the number of transplanted human T cells, the amount of bispecific antigen-binding molecules to be administered, and the timelines, while still arriving at a meaningful and reproducible result. Preferably, the tumor growth inhibition T/C [%] is ≤70 or ≤60, more preferably ≤50 or ≤40, even more preferably ≤30 or ≤20 and most preferably ≤10 or ≤5 or even ≤2.5. Tumor growth inhibition is preferably close to 100%.

[0392] In a preferred embodiment of the antigen-binding molecule of the invention the antigen-binding molecule is a single chain antigen-binding molecule.

[0393] Also in a preferred embodiment of the antigen-binding molecule of the invention said spacer comprises in an amino to carboxyl order:
[0394] hinge-CH2-CH3-linker-hinge-CH2-CH3.

[0395] In one embodiment of the invention each of said polypeptide monomers of the spacer has an amino acid sequence that is at least 90% identical to a sequence selected from the group consisting of: SEQ ID NO: 17-24. In a preferred embodiment or the invention each of said polypeptide monomers has an amino acid sequence selected from SEQ ID NO: 17-24.

[0396] Also in one embodiment of the invention the CH2 domain of one or preferably each (both) polypeptide monomers of the spacer comprises an intra domain cysteine disulfide bridge. As known in the art the term “cysteine disulfide bridge” refers to a functional group with the general structure R—S—S—R. The linkage is also called an SS-bond or a disulfide bridge and is derived by the coupling of two thiol groups of cysteine residues. It is particularly preferred for the antigen-binding molecule of the invention that the cysteines forming the cysteine disulfide bridge in the mature antigen-binding molecule are introduced into the amino acid sequence of the CH2 domain corresponding to 309 and 321 (Kabat numbering).

[0397] In one embodiment of the invention a glycosylation site in Kabat position 314 of the CH2 domain is removed. It is preferred that this removal of the glycosylation site is achieved by a N314X substitution, wherein X is any amino acid excluding Q. Said substitution is preferably a N314G. In a more preferred embodiment, said CH2 domain additionally comprises the following substitutions (position according to Kabat) V321C and R309C (these substitutions introduce the intra domain cysteine disulfide bridge at Kabat positions 309 and 321).

[0398] It is assumed that the preferred features of the antigen-binding molecule of the invention compared e.g. to the bispecific heteroFc antigen-binding molecule known in the art may be inter alia related to the introduction of the above described modifications in the CH2 domain. Thus, it is preferred for the construct of the invention that the CH2 domains in the spacer of the antigen-binding molecule of the invention comprise the intra domain cysteine disulfide bridge at Kabat positions 309 and 321 and/or the glycosylation site at Kabat position 314 is removed, preferably by a N314G substitution.

[0399] In a further preferred embodiment of the invention the CH2 domains in the spacer of the antigen-binding molecule of the invention comprise the intra domain cysteine disulfide bridge at Kabat positions 309 and 321 and the glycosylation site at Kabat position 314 is removed by a N314G substitution. Most preferably, the polypeptide monomer of the spacer of the antigen-binding molecule of the invention has an amino acid sequence selected from the group consisting of SEQ ID NO: 17 and 18.

[0400] In one embodiment the invention provides an antigen-binding molecule, wherein:
[0401] (i) the first domain comprises two antibody variable domains and the second domain comprises two antibody variable domains;
[0402] (ii) the first domain comprises one antibody variable domain and the second domain comprises two antibody variable domains;
[0403] (iii) the first domain comprises two antibody variable domains and the second domain comprises one antibody variable domain; or
[0404] (iv) the first domain comprises one antibody variable domain and the second domain comprises one antibody variable domain.

[0405] Accordingly, the first and the second domain may be binding domains comprising each two antibody variable domains such as a VH and a VL domain. Examples for such binding domains comprising two antibody variable domains where described herein above and comprise e.g. Fv fragments, scFv fragments or Fab fragments described herein above. Alternatively, either one or both of those binding domains may comprise only a single variable domain. Examples for such single domain binding domains where described herein above and comprise e.g. nanobodies or single variable domain antibodies comprising merely one variable domain, which may be VHH, VH or VL, that specifically bind an antigen or epitope independently of other V regions or domains.

[0406] In a preferred embodiment of the antigen-binding molecule of the invention second and third binding domain are fused to the spacer via a peptide linker. Preferred peptide linker have been described herein above and are characterized by the amino acid sequence Gly-Gly-Gly-Gly-Ser, i.e. Gly₄Ser (SEQ ID NO: 7), or polymers thereof, i.e. (Gly₄Ser)x, where x is an integer of 1 or greater (e.g. 2 or 3). A particularly preferred linker for the fusion of the first and second domain to the spacer is depicted in SEQ ID NO: 7.

[0407] The antigen-binding molecule of the present invention comprises a first domain which binds to CS1, BCMA, CD20, CD22, FLT3, CD123, CLL1, CHD3, MSLN, or EpCAM, preferably to the extracellular domain(s) (ECD) of CS1, BCMA, CD20, CD22, FLT3, CD123, CLL1, CHD3, MSLN, or EpCAM. It is understood that the term “binding to the extracellular domain of CS1, BCMA, CD20, CD22, FLT3, CD123, CLL1, CHD3, MSLN, or EpCAM”, in the context of the present invention, implies that the binding domain binds to CS1, BCMA, CD20, CD22, FLT3, CD123, CLL1, CHD3, MSLN, or EpCAM expressed on the surface of a target cell. The first domain according to the invention hence preferably binds to CS1, BCMA, CD20, CD22, FLT3, CD123, CLL1, CHD3, MSLN, or EpCAM when it is expressed by naturally expressing cells or cell lines, and/or by cells or cell lines transformed or (stably/transiently) transfected with CS1, BCMA, CD20, CD22, FLT3, CD123, CLL1, CHD3, MSLN, or EpCAM. In a preferred embodiment the first binding domain also binds to CS1, BCMA, CD20, CD22, FLT3, CD123, CLL1, CHD3, MSLN, or EpCAM when CS1, BCMA, CD20, CD22, FLT3, CD123, CLL1, CHD3, MSLN, or EpCAM is used as a “target” or “ligand” molecule in an in vitro binding assay such as BIAcore or Scatchard. The “target cell” can be any prokaryotic or eukaryotic cell expressing CS1, BCMA, CD20, CD22, FLT3, CD123, CLL1, CHD3, MSLN, or EpCAM on its surface; preferably the target cell is a cell that is part of the human or animal body, such as a specific CS1, BCMA, CD20, CD22, FLT3, CD123, CLL1, CHD3, MSLN, or EpCAM expressing cancer or tumor cell.

[0408] Preferably, the first binding domain binds to human CS1, BCMA, CD20, CD22, FLT3, CD123, CLL1, CHD3, MSLN, or EpCAM/CS1, BCMA, CD20, CD22, FLT3, CD123, CLL1, CHD3, MSLN, or EpCAM ECD. In a further preferred embodiment, it binds to macaque CS1, BCMA, CD20, CD22, FLT3, CD123, CLL1, CHD3, MSLN, or EpCAM/CS1, BCMA, CD20, CD22, FLT3, CD123, CLL1, CHD3, MSLN, or EpCAM ECD. According to the most preferred embodiment, it binds to both the human and the macaque CS1, BCMA, CD20, CD22, FLT3, CD123, CLL1, CHD3, MSLN, or EpCAM/CS1, BCMA, CD20, CD22, FLT3, CD123, CLL1, CHD3, MSLN, or EpCAM ECD. The “CS1, BCMA, CD20, CD22, FLT3, CD123, CLL1, CHD3, MSLN, or EpCAM extracellular domain” or “CS1, BCMA, CD20, CD22, FLT3, CD123, CLL1, CHD3, MSLN, or EpCAM ECD” refers to the CS1, BCMA, CD20, CD22, FLT3, CD123, CLL1, CHD3, MSLN, or EpCAM region or sequence which is essentially free of transmembrane and cytoplasmic domains of CS1, BCMA, CD20, CD22, FLT3, CD123, CLL1, CHD3, MSLN, or EpCAM. It will be understood by the skilled artisan that the transmembrane domain identified for the CS1, BCMA, CD20, CD22, FLT3, CD123, CLL1, CHD3, MSLN, or EpCAM polypeptide of the present invention is identified pursuant to criteria routinely employed in the art for identifying that type of hydrophobic domain. The exact boundaries of a transmembrane domain may vary but most likely by no more than about 5 amino acids at either end of the domain specifically mentioned herein.

[0409] Preferred binding domains which bind to CD3 are disclosed in WO 2010/037836, and WO 2011/121110. Any binding domain for CD3 described in these applications may be used in the context of the present invention.

[0410] The invention further provides a polynucleotide/nucleic acid molecule encoding an antigen-binding molecule of the invention. A polynucleotide is a biopolymer composed of 13 or more nucleotide monomers covalently bonded in a chain. DNA (such as cDNA) and RNA (such as mRNA) are examples of polynucleotides with distinct biological function. Nucleotides are organic molecules that serve as the monomers or subunits of nucleic acid molecules like DNA or RNA. The nucleic acid molecule or polynucleotide can be double stranded and single stranded, linear and circular. It is preferably comprised in a vector which is preferably comprised in a host cell. Said host cell is, e.g. after transformation or transfection with the vector or the polynucleotide of the invention, capable of expressing the antigen-binding molecule. For that purpose the polynucleotide or nucleic acid molecule is operatively linked with control sequences.

[0411] The genetic code is the set of rules by which information encoded within genetic material (nucleic acids) is translated into proteins. Biological decoding in living cells is accomplished by the ribosome which links amino acids in an order specified by mRNA, using tRNA molecules to carry amino acids and to read the mRNA three nucleotides at a time. The code defines how sequences of these nucleotide triplets, called codons, specify which amino acid will be added next during protein synthesis. With some exceptions, a three-nucleotide codon in a nucleic acid sequence specifies a single amino acid. Because the vast majority of genes are encoded with exactly the same code, this particular code is often referred to as the canonical or standard genetic code. While the genetic code determines the protein sequence for a given coding region, other genomic regions can influence when and where these proteins are produced.

[0412] Furthermore, the invention provides a vector comprising a polynucleotide/nucleic acid molecule of the invention. A vector is a nucleic acid molecule used as a vehicle to transfer (foreign) genetic material into a cell. The term “vector” encompasses—but is not restricted to—plasmids, viruses, cosmids and artificial chromosomes. In general, engineered vectors comprise an origin of replication, a multicloning site and a selectable marker. The vector itself is generally a nucleotide sequence, commonly a DNA sequence that comprises an insert (transgene) and a larger sequence that serves as the “backbone” of the vector. Modern vectors may encompass additional features besides the transgene insert and a backbone: promoter, genetic marker, antibiotic resistance, reporter gene, targeting sequence, protein purification tag. Vectors called expression vectors (expression constructs) specifically are for the expression of the transgene in the target cell, and generally have control sequences.

[0413] The term “control sequences” refers to DNA sequences necessary for the expression of an operably linked coding sequence in a particular host organism. The control sequences that are suitable for prokaryotes, for example, include a promoter, optionally an operator sequence, and a ribosome binding side. Eukaryotic cells are known to utilize promoters, polyadenylation signals, and enhancers.

[0414] A nucleic acid is “operably linked” when it is placed into a functional relationship with another nucleic acid sequence. For example, DNA for a presequence or secretory leader is operably linked to DNA for a polypeptide if it is expressed as a preprotein that participates in the secretion of the polypeptide; a promoter or enhancer is operably linked to a coding sequence if it affects the transcription of the sequence; or a ribosome binding side is operably linked to a coding sequence if it is positioned so as to facilitate translation. Generally, “operably linked” means that the DNA sequences being linked are contiguous, and, in the case of a secretory leader, contiguous and in reading phase. However, enhancers do not have to be contiguous. Linking is accomplished by ligation at convenient restriction sites. If such sites do not exist, the synthetic oligonucleotide adaptors or linkers are used in accordance with conventional practice.

[0415] “Transfection” is the process of deliberately introducing nucleic acid molecules or polynucleotides (including vectors) into target cells. The term is mostly used for non-viral methods in eukaryotic cells. Transduction is often used to describe virus-mediated transfer of nucleic acid molecules or polynucleotides. Transfection of animal cells typically involves opening transient pores or “holes” in the cell membrane, to allow the uptake of material. Transfection can be carried out using calcium phosphate, by electroporation, by cell squeezing or by mixing a cationic lipid with the material to produce liposomes, which fuse with the cell membrane and deposit their cargo inside.

[0416] The term “transformation” is used to describe non-viral transfer of nucleic acid molecules or polynucleotides (including vectors) into bacteria, and also into non-animal eukaryotic cells, including plant cells. Transformation is hence the genetic alteration of a bacterial or non-animal eukaryotic cell resulting from the direct uptake through the cell membrane(s) from its surroundings and subsequent incorporation of exogenous genetic material (nucleic acid molecules). Transformation can be effected by artificial means. For transformation to happen, cells or bacteria must be in a state of competence, which may occur as a time-limited response to environmental conditions such as starvation and cell density.

[0417] Moreover, the invention provides a host cell transformed or transfected with the polynucleotide/nucleic acid molecule or with the vector of the invention. As used herein, the terms “host cell” or “recipient cell” are intended to include any individual cell or cell culture that can be or has/have been recipients of vectors, exogenous nucleic acid molecules, and polynucleotides encoding the antigen-binding molecule of the present invention; and/or recipients of the antigen-binding molecule itself. The introduction of the respective material into the cell is carried out by way of transformation, transfection and the like. The term “host cell” is also intended to include progeny or potential progeny of a single cell. Because certain modifications may occur in succeeding generations due to either natural, accidental, or deliberate mutation or due to environmental influences, such progeny may not, in fact, be completely identical (in morphology or in genomic or total DNA complement) to the parent cell, but is still included within the scope of the term as used herein. Suitable host cells include prokaryotic or eukaryotic cells, and also include but are not limited to bacteria, yeast cells, fungi cells, plant cells, and animal cells such as insect cells and mammalian cells, e.g., murine, rat, macaque or human.

[0418] The antigen-binding molecule of the invention can be produced in bacteria. After expression, the antigen-binding molecule of the invention is isolated from the E. coli cell paste in a soluble fraction and can be purified through, e.g., affinity chromatography and/or size exclusion. Final purification can be carried out similar to the process for purifying antibody expressed e.g., in CHO cells.

[0419] In addition to prokaryotes, eukaryotic microbes such as filamentous fungi or yeast are suitable cloning or expression hosts for the antigen-binding molecule of the invention. Saccharomyces cerevisiae, or common baker's yeast, is the most commonly used among lower eukaryotic host microorganisms. However, a number of other genera, species, and strains are commonly available and useful herein, such as Schizosaccharomyces pombe, Kluyveromyces hosts such as K. lactis, K. fragilis (ATCC 12424), K. bulgaricus (ATCC 16045), K. wickeramii (ATCC 24178), K. waltii (ATCC 56500), K. drosophilarum (ATCC 36906), K. thermotolerans, and K. marxianus; yarrowia (EP 402 226); Pichia pastoris (EP 183 070); Candida; Trichoderma reesia (EP 244 234); Neurospora crassa; Schwanniomyces such as Schwanniomyces occidentalis; and filamentous fungi such as Neurospora, Penicillium, Tolypocladium, and Aspergillus hosts such as A. nidulans and A. niger.

[0420] Suitable host cells for the expression of glycosylated antigen-binding molecule of the invention are derived from multicellular organisms. Examples of invertebrate cells include plant and insect cells. Numerous baculoviral strains and variants and corresponding permissive insect host cells from hosts such as Spodoptera frugiperda (caterpillar), Aedes aegypti (mosquito), Aedes albopictus (mosquito), Drosophila melanogaster (fruit fly), and Bombyx mori have been identified. A variety of viral strains for transfection are publicly available, e.g., the L-1 variant of Autographa californica NPV and the Bm-5 strain of Bombyx mori NPV, and such viruses may be used as the virus herein according to the present invention, particularly for transfection of Spodoptera frugiperda cells.

[0421] Plant cell cultures of cotton, corn, potato, soybean, petunia, tomato, Arabidopsis and tobacco can also be used as hosts. Cloning and expression vectors useful in the production of proteins in plant cell culture are known to those of skill in the art. See e.g. Hiatt et al., Nature (1989) 342: 76-78, Owen et al. (1992) Bio/Technology 10: 790-794, Artsaenko et al. (1995) The Plant J 8: 745-750, and Fecker et al. (1996) Plant Mol Biol 32: 979-986.

[0422] However, interest has been greatest in vertebrate cells, and propagation of vertebrate cells in culture (tissue culture) has become a routine procedure. Examples of useful mammalian host cell lines are monkey kidney CV1 line transformed by SV40 (COS-7, ATCC CRL 1651); human embryonic kidney line (293 or 293 cells subcloned for growth in suspension culture, Graham et al., J. Gen Virol. 36: 59 (1977)); baby hamster kidney cells (BHK, ATCC CCL 10); Chinese hamster ovary cells/-DHFR (CHO, Urlaub et al., Proc. Natl. Acad. Sci. USA 77: 4216 (1980)); mouse sertoli cells (TM4, Mather, Biol. Reprod. 23: 243-251 (1980)); monkey kidney cells (CVI ATCC CCL 70); African green monkey kidney cells (VERO-76, ATCC CRL1587); human cervical carcinoma cells (HELA, ATCC CCL 2); canine kidney cells (MDCK, ATCC CCL 34); buffalo rat liver cells (BRL 3A, ATCC CRL 1442); human lung cells (W138, ATCC CCL 75); human liver cells (Hep G2,1413 8065); mouse mammary tumor (MMT 060562, ATCC CCL5 1); TRI cells (Mather et al., Annals N. Y Acad. Sci. (1982) 383: 44-68); MRC 5 cells; FS4 cells; and a human hepatoma line (Hep G2).

[0423] In a further embodiment the invention provides a process for the production of an antigen-binding molecule of the invention, said process comprising culturing a host cell of the invention under conditions allowing the expression of the antigen-binding molecule of the invention and recovering the produced antigen-binding molecule from the culture.

[0424] As used herein, the term “culturing” refers to the in vitro maintenance, differentiation, growth, proliferation and/or propagation of cells under suitable conditions in a medium. The term “expression” includes any step involved in the production of an antigen-binding molecule of the invention including, but not limited to, transcription, post-transcriptional modification, translation, post-translational modification, and secretion.

[0425] When using recombinant techniques, the antigen-binding molecule can be produced intracellularly, in the periplasmic space, or directly secreted into the medium. If the antigen-binding molecule is produced intracellularly, as a first step, the particulate debris, either host cells or lysed fragments, are removed, for example, by centrifugation or ultrafiltration. Carter et al., Bio/Technology 10: 163-167 (1992) describe a procedure for isolating antibodies which are secreted to the periplasmic space of E. coli. Briefly, cell paste is thawed in the presence of sodium acetate (pH 3.5), EDTA, and phenylmethylsulfonylfluoride (PMSF) over about 30 min. Cell debris can be removed by centrifugation. Where the antibody is secreted into the medium, supernatants from such expression systems are generally first concentrated using a commercially available protein concentration filter, for example, an Amicon or Millipore Pellicon ultrafiltration unit. A protease inhibitor such as PMSF may be included in any of the foregoing steps to inhibit proteolysis and antibiotics may be included to prevent the growth of adventitious contaminants.

[0426] The antigen-binding molecule of the invention prepared from the host cells can be recovered or purified using, for example, hydroxylapatite chromatography, gel electrophoresis, dialysis, and affinity chromatography. Other techniques for protein purification such as fractionation on an ion-exchange column, ethanol precipitation, Reverse Phase HPLC, chromatography on silica, chromatography on heparin SEPHAROSE™, chromatography on an anion or cation exchange resin (such as a polyaspartic acid column), chromato-focusing, SDS-PAGE, and ammonium sulfate precipitation are also available depending on the antibody to be recovered. Where the antigen-binding molecule of the invention comprises a CH3 domain, the Bakerbond ABX resin (J. T. Baker, Phillipsburg, NJ) is useful for purification.

[0427] Affinity chromatography is a preferred purification technique. The matrix to which the affinity ligand is attached is most often agarose, but other matrices are available. Mechanically stable matrices such as controlled pore glass or poly (styrenedivinyl) benzene allow for faster flow rates and shorter processing times than can be achieved with agarose.

[0428] Moreover, the invention provides a pharmaceutical composition comprising an antigen-binding molecule of the invention or an antigen-binding molecule produced according to the process of the invention. It is preferred for the pharmaceutical composition of the invention that the homogeneity of the antigen-binding molecule is ≥80%, more preferably ≥81%, ≥82%≥83%≥84%, or ≥85%, further preferably ≥86%, ≥87%, ≥88%≥89%, or ≥90%, still further preferably, ≥91%≥ 92%, ≥93%≥94%, or ≥95% and most preferably ≥96%, ≥97%, ≥98% or ≥99%.

[0429] As used herein, the term “pharmaceutical composition” relates to a composition which is suitable for administration to a patient, preferably a human patient. The particularly preferred pharmaceutical composition of this invention comprises one or a plurality of the antigen-binding molecule(s) of the invention, preferably in a therapeutically effective amount. Preferably, the pharmaceutical composition further comprises suitable formulations of one or more (pharmaceutically effective) carriers, stabilizers, excipients, diluents, solubilizers, surfactants, emulsifiers, preservatives and/or adjuvants. Acceptable constituents of the composition are preferably nontoxic to recipients at the dosages and concentrations employed. Pharmaceutical compositions of the invention include, but are not limited to, liquid, frozen, and lyophilized compositions.

[0430] The inventive compositions may comprise a pharmaceutically acceptable carrier. In general, as used herein, “pharmaceutically acceptable carrier” means any and all aqueous and non-aqueous solutions, sterile solutions, solvents, buffers, e.g. phosphate buffered saline (PBS) solutions, water, suspensions, emulsions, such as oil/water emulsions, various types of wetting agents, liposomes, dispersion media and coatings, which are compatible with pharmaceutical administration, in particular with parenteral administration. The use of such media and agents in pharmaceutical compositions is well known in the art, and the compositions comprising such carriers can be formulated by well-known conventional methods.

[0431] Certain embodiments provide pharmaceutical compositions comprising the antigen-binding molecule of the invention and further one or more excipients such as those illustratively described in this section and elsewhere herein. Excipients can be used in the invention in this regard for a wide variety of purposes, such as adjusting physical, chemical, or biological properties of formulations, such as adjustment of viscosity, and or processes of the invention to improve effectiveness and or to stabilize such formulations and processes against degradation and spoilage due to, for instance, stresses that occur during manufacturing, shipping, storage, pre-use preparation, administration, and thereafter.

[0432] In certain embodiments, the pharmaceutical composition may contain formulation materials for the purpose of modifying, maintaining or preserving, e.g., the pH, osmolarity, viscosity, clarity, color, isotonicity, odor, sterility, stability, rate of dissolution or release, adsorption or penetration of the composition (see, REMINGTON'S PHARMACEUTICAL SCIENCES, 18″ Edition, (A. R. Genrmo, ed.), 1990, Mack Publishing Company). In such embodiments, suitable formulation materials may include, but are not limited to:
[0433] amino acids such as glycine, alanine, glutamine, asparagine, threonine, proline, 2-phenylalanine, including charged amino acids, preferably lysine, lysine acetate, arginine, glutamate and/or histidine antimicrobials such as antibacterial and antifungal agents
[0434] antioxidants such as ascorbic acid, methionine, sodium sulfite or sodium hydrogen-sulfite;
[0435] buffers, buffer systems and buffering agents which are used to maintain the composition at physiological pH or at a slightly lower pH, preferably a lower pH of 4.0 to 6.5; examples of buffers are borate, bicarbonate, Tris-HCl, citrates, phosphates or other organic acids, succinate, phosphate, and histidine; for example Tris buffer of about pH 7.0-8.5;
[0436] non-aqueous solvents such as propylene glycol, polyethylene glycol, vegetable oils such as olive oil, and injectable organic esters such as ethyl oleate;
[0437] aqueous carriers including water, alcoholic/aqueous solutions, emulsions or suspensions, including saline and buffered media;
[0438] biodegradable polymers such as polyesters;
[0439] bulking agents such as mannitol or glycine;
[0440] chelating agents such as ethylenediamine tetraacetic acid (EDTA);
[0441] isotonic and absorption delaying agents;
[0442] complexing agents such as caffeine, polyvinylpyrrolidone, beta-cyclodextrin or hydroxypropyl-beta-cyclodextrin)
[0443] fillers;
[0444] monosaccharides; disaccharides; and other carbohydrates (such as glucose, mannose or dextrins); carbohydrates may be non-reducing sugars, preferably trehalose, sucrose, octasulfate, sorbitol or xylitol;
[0445] (low molecular weight) proteins, polypeptides or proteinaceous carriers such as human or bovine serum albumin, gelatin or immunoglobulins, preferably of human origin;
[0446] coloring and flavouring agents;
[0447] sulfur containing reducing agents, such as glutathione, thioctic acid, sodium thioglycolate, thioglycerol, [alpha]-monothioglycerol, and sodium thio sulfate
[0448] diluting agents;
[0449] emulsifying agents;
[0450] hydrophilic polymers such as polyvinylpyrrolidone)
[0451] salt-forming counter-ions such as sodium;
[0452] preservatives such as antimicrobials, anti-oxidants, chelating agents, inert gases and the like; examples are: benzalkonium chloride, benzoic acid, salicylic acid, thimerosal, phenethyl alcohol, methylparaben, propylparaben, chlorhexidine, sorbic acid or hydrogen peroxide);
[0453] metal complexes such as Zn-protein complexes;
[0454] solvents and co-solvents (such as glycerin, propylene glycol or polyethylene glycol);

[0455] sugars and sugar alcohols, such as trehalose, sucrose, octasulfate, mannitol, sorbitol or xylitol stachyose, mannose, sorbose, xylose, ribose, myoinisitose, galactose, lactitol, ribitol, myoinisitol, galactitol, glycerol, cyclitols (e.g., inositol), polyethylene glycol; and polyhydric sugar alcohols;
[0456] suspending agents;
[0457] surfactants or wetting agents such as pluronics, PEG, sorbitan esters, polysorbates such as polysorbate 20, polysorbate, triton, tromethamine, lecithin, cholesterol, tyloxapal; surfactants may be detergents, preferably with a molecular weight of >1.2 KD and/or a polyether, preferably with a molecular weight of >3 KD; non-limiting examples for preferred detergents are Tween 20, Tween 40, Tween 60, Tween 80 and Tween 85; non-limiting examples for preferred polyethers are PEG 3000, PEG 3350, PEG 4000 and PEG 5000;
[0458] stability enhancing agents such as sucrose or sorbitol;
[0459] tonicity enhancing agents such as alkali metal halides, preferably sodium or potassium chloride, mannitol sorbitol;
[0460] parenteral delivery vehicles including sodium chloride solution, Ringer's dextrose, dextrose and sodium chloride, lactated Ringer's, or fixed oils;
[0461] intravenous delivery vehicles including fluid and nutrient replenishers, electrolyte replenishers (such as those based on Ringer's dextrose).

[0462] In the context of the present invention, a pharmaceutical composition, which is preferably a liquid composition or may be a solid composition obtained by lyophilisation or may be a reconstituted liquid composition comprises
[0463] (a) an antigen-binding molecule comprising at least four binding domains, wherein:
   [0464] a first and a third domain binds to a target cell surface antigen and has an isoelectric point (pI) in the range of 4 to 9,5;
   [0465] a second and a fourth domain binds to CD3; and has a pI in the range of 8 to 10, preferably 8.5 to 9.0; and
   [0466] a spacer comprising preferably two polypeptide monomers, each comprising a hinge, a CH2 domain and a CH3 domain, wherein said two polypeptide monomers are fused to each other via a peptide linker;
[0467] (b) at least one buffer agent;
[0468] (c) at least one saccharide; and
[0469] (d) at least one surfactant;
[0470] and wherein the pH of the pharmaceutical composition is in the range of 3.5 to 6.

[0471] It is further envisaged in the context of the present invention that the at least one buffer agent is present at a concentration range of 5 to 200 mM, more preferably at a concentration range of 10 to 50 mM. It is envisaged in the context of the present invention that the at least one saccharide is selected from the group consisting of monosaccharide, disaccharide, cyclic polysaccharide, sugar alcohol, linear branched dextran or linear non-branched dextran. It is also envisaged in the context of the present invention that the disaccharide is selected from the group consisting of sucrose, trehalose and mannitol, sorbitol, and combinations thereof. It is further envisaged in the context of the present invention that the sugar alcohol is sorbitol. It is envisaged in the context of the present invention that the at least one saccharide is present at a concentration in the range of 1 to 15% (m/V), preferably in a concentration range of 9 to 12% (m/V).

[0472] It is also envisaged in the context of the present invention that the at least one surfactant is selected from the group consisting of polysorbate 20, polysorbate 40, polysorbate 60, polysorbate 80, poloxamer 188, pluronic F68, triton X-100, polyoxyethylen, PEG 3350, PEG 4000 and combinations thereof. It is further envisaged in the context of the present invention that the at least one surfactant is present at a concentration in the range of 0.004 to 0.5% (m/V), preferably in the range of 0.001 to 0.01% (m/V). It is envisaged in the context of the present invention that the pH of the composition is in the range of 4.0 to 5.0, preferably 4.2. It is also envisaged in the context of the present invention that the pharmaceutical composition has an osmolarity in the range of 150 to 500 mOsm. It is further envisaged in the context of the present invention that the pharmaceutical composition further comprises an excipient selected from the group consisting of, one or more polyol and one or more amino acid. It is envisaged in the context of the present invention that said one or more excipient is present in the concentration range of 0.1 to 15% (w/V).

[0473] It is also envisaged in the context of the present invention that the pharmaceutical composition comprises
[0474] (a) the antigen-binding molecule as discussed above,
[0475] (b) 10 mM glutamate or acetate,
[0476] (c) 9% (m/V) sucrose or 6% (m/V) sucrose and 6% (m/V) hydroxypropyl-β-cyclodextrin,
[0477] (d) 0.01% (m/V) polysorbate 80
[0478] and wherein the pH of the liquid pharmaceutical composition is 4.2.

[0479] It is further envisaged in the context of the present invention that the antigen-binding molecule is present in a concentration range of 0.1 to 8 mg/ml, preferably of 0.2-2.5 mg/ml, more preferably of 0.25-1.0 mg/ml.

[0480] It is evident to those skilled in the art that the different constituents of the pharmaceutical composition (e.g., those listed above) can have different effects, for example, and amino acid can act as a buffer, a stabilizer and/or an antioxidant; mannitol can act as a bulking agent and/or a tonicity enhancing agent; sodium chloride can act as delivery vehicle and/or tonicity enhancing agent; etc.

[0481] It is envisaged that the composition of the invention may comprise, in addition to the polypeptide of the invention defined herein, further biologically active agents, depending on the intended use of the composition. Such agents may be drugs acting on the gastro-intestinal system, drugs acting as cytostatica, drugs preventing hyperurikemia, drugs inhibiting immunoreactions (e.g. corticosteroids), drugs modulating the inflammatory response, drugs acting on the circulatory system and/or agents such as cytokines known in the art. It is also envisaged that the antigen-binding molecule of the present invention is applied in a co-therapy, i.e., in combination with another anti-cancer medicament.

[0482] In certain embodiments, optimal pharmaceutical compositions may influence the physical state, stability, rate of in vivo release and rate of in vivo clearance of the antigen-binding molecule of the invention. In certain embodiments, the primary vehicle or carrier in a pharmaceutical composition may be either aqueous or non-aqueous in nature. For example, a suitable vehicle or carrier may be water for injection, physiological saline solution or artificial cerebrospinal fluid, possibly supplemented with other materials common in compositions for parenteral administration. Neutral buffered saline or saline mixed with serum albumin are further exemplary vehicles. In certain embodiments, the antigen-binding molecule of the invention compositions may be prepared for storage by mixing the selected composition having the desired degree of purity with optional formulation agents (REMINGTON'S PHARMACEUTICAL SCIENCES, supra) in the form of a lyophilized cake or an aqueous solution. Further, in certain embodiments, the antigen-binding molecule of the invention may be formulated as a lyophilizate using appropriate excipients such as sucrose.

[0483] When parenteral administration is contemplated, the therapeutic compositions for use in this invention may be provided in the form of a pyrogen-free, parenterally acceptable aqueous solution comprising the desired antigen-binding molecule of the invention in a pharmaceutically acceptable vehicle. A particularly suitable vehicle for parenteral injection is sterile distilled water in which the antigen-binding molecule of the invention is formulated as a sterile, isotonic solution, properly preserved. In certain embodiments, the preparation can involve the formulation of the desired molecule with an agent, such as injectable microspheres, bio-erodible particles, polymeric compounds (such as polylactic acid or polyglycolic acid), beads or liposomes, that may provide controlled or sustained release of the product which can be delivered via depot injection. In certain embodiments, hyaluronic acid may also be used, having the effect of promoting sustained duration in the circulation. In certain embodiments, implantable drug delivery devices may be used to introduce the desired antigen-binding molecule.

[0484] Additional pharmaceutical compositions will be evident to those skilled in the art, including formulations involving the antigen-binding molecule of the invention in sustained- or controlled-delivery/release formulations. Techniques for formulating a variety of other sustained- or controlled-delivery means, such as liposome carriers, bio-erodible microparticles or porous beads and depot injections, are also known to those skilled in the art. See, for example, International Patent Application No. PCT/US93/00829, which describes controlled release of porous polymeric microparticles for delivery of pharmaceutical compositions. Sustained-release preparations may include semipermeable polymer matrices in the form of shaped articles, e.g., films, or microcapsules. Sustained release matrices may include polyesters, hydrogels, polylactides (as disclosed in U.S. Pat. No. 3,773,919 and European Patent Application Publication No. EP 058481), copolymers of L-glutamic acid and gamma ethyl-L-glutamate (Sidman et al., 1983, Biopolymers 2:547-556), poly (2-hydroxyethyl-methacrylate) (Langer et al., 1981, J. Biomed. Mater. Res. 15:167-277 and Langer, 1982, Chem. Tech. 12:98-105), ethylene vinyl acetate (Langer et al., 1981, supra) or poly-D(−)-3-hydroxybutyric acid (European Patent Application Publication No. EP 133,988). Sustained release compositions may also include liposomes that can be prepared by any of several methods known in the art. See, e.g., Eppstein et al., 1985, Proc. Natl. Acad. Sci. U.S.A. 82:3688-3692; European Patent Application Publication Nos. EP 036,676; EP 088,046 and EP 143,949.

[0485] The antigen-binding molecule may also be entrapped in microcapsules prepared, for example, by coacervation techniques or by interfacial polymerization (for example, hydroxymethylcellulose or gelatine-microcapsules and poly (methylmethacylate) microcapsules, respectively), in colloidal drug delivery systems (for example, liposomes, albumin microspheres, microemulsions, nanoparticles and nanocapsules), or in macroemulsions. Such techniques are disclosed in Remington's Pharmaceutical Sciences, 16th edition, Oslo, A., Ed., (1980).

[0486] Pharmaceutical compositions used for in vivo administration are typically provided as sterile preparations. Sterilization can be accomplished by filtration through sterile filtration membranes. When the composition is lyophilized, sterilization using this method may be conducted either prior to or following lyophilization and reconstitution. Compositions for parenteral administration can be stored in lyophilized form or in a solution. Parenteral compositions generally are placed into a container having a sterile access port, for example, an intravenous solution bag or vial having a stopper pierceable by a hypodermic injection needle.

[0487] Another aspect of the invention includes self-buffering antigen-binding molecule of the invention formulations, which can be used as pharmaceutical compositions, as described in international patent application WO 06138181A2 (PCT/US2006/022599). A variety of expositions are available on protein stabilization and formulation materials and methods useful in this regard, such as Arakawa et al., “Solvent interactions in pharmaceutical formulations,” Pharm Res. 8(3): 285-91 (1991); Kendrick et al., “Physical stabilization of proteins in aqueous solution” in: RATIONAL DESIGN OF STABLE PROTEIN FORMULATIONS: THEORY AND PRACTICE, Carpenter and Manning, eds. Pharmaceutical Biotechnology. 13: 61-84 (2002), and Randolph et al., “Surfactant-protein interactions”. Pharm Biotechnol. 13: 159-75 (2002), see particularly the parts pertinent to excipients and processes of the same for self-buffering protein formulations in accordance with the current invention, especially as to protein pharmaceutical products and processes for veterinary and/or human medical uses.

[0488] Salts may be used in accordance with certain embodiments of the invention to, for example, adjust the ionic strength and/or the isotonicity of a formulation and/or to improve the solubility and/or physical stability of a protein or other ingredient of a composition in accordance with the invention. As is well known, ions can stabilize the native state of proteins by binding to charged residues on the protein's surface and by shielding charged and polar groups in the protein and reducing the strength of their electrostatic interactions, attractive, and repulsive interactions. Ions also can stabilize the denatured state of a protein by binding to, in particular, the denatured peptide linkages (—CONH) of the protein. Furthermore, ionic interaction with charged and polar groups in a protein also can reduce intermolecular electrostatic interactions and, thereby, prevent or reduce protein aggregation and insolubility.

[0489] Ionic species differ significantly in their effects on proteins. A number of categorical rankings of ions and their effects on proteins have been developed that can be used in formulating pharmaceutical compositions in accordance with the invention. One example is the Hofmeister series, which ranks ionic and polar non-ionic solutes by their effect on the conformational stability of proteins in solution. Stabilizing solutes are referred to as “kosmotropic”. Destabilizing solutes are referred to as “chaotropic”. Kosmotropes commonly are used at high concentrations (e.g., >1 molar ammonium sulfate) to precipitate proteins from solution (“salting-out”). Chaotropes commonly are used to denture and/or to solubilize proteins (“salting-in”). The relative effectiveness of ions to “salt-in” and “salt-out” defines their position in the Hofmeister series.

[0490] Free amino acids can be used in the antigen-binding molecule of the invention formulations in accordance with various embodiments of the invention as bulking agents, stabilizers, and antioxidants, as well as other standard uses. Lysine, proline, serine, and alanine can be used for stabilizing proteins in a formulation. Glycine is useful in lyophilization to ensure correct cake structure and properties. Arginine may be useful to inhibit protein aggregation, in both liquid and lyophilized formulations. Methionine is useful as an antioxidant.

[0491] Polyols include sugars, e.g., mannitol, sucrose, and sorbitol and polyhydric alcohols such as, for instance, glycerol and propylene glycol, and, for purposes of discussion herein, polyethylene glycol (PEG) and related substances. Polyols are kosmotropic. They are useful stabilizing agents in both liquid and lyophilized formulations to protect proteins from physical and chemical degradation processes. Polyols also are useful for adjusting the tonicity of formulations. Among polyols useful in select embodiments of the invention is mannitol, commonly used to ensure structural stability of the cake in lyophilized formulations. It ensures structural stability to the cake. It is generally used with a lyoprotectant, e.g., sucrose. Sorbitol and sucrose are among preferred agents for adjusting tonicity and as stabilizers to protect against freeze-thaw stresses during transport or the preparation of bulks during the manufacturing process. Reducing sugars (which contain free aldehyde or ketone groups), such as glucose and lactose, can glycate surface lysine and arginine residues. Therefore, they generally are not among preferred polyols for use in accordance with the invention. In addition, sugars that form such reactive species, such as sucrose, which is hydrolyzed to fructose and glucose under acidic conditions, and consequently engenders glycation, also is not among preferred polyols of the invention in this regard. PEG is useful to stabilize proteins and as a cryoprotectant and can be used in the invention in this regard.

[0492] Embodiments of the antigen-binding molecule of the invention formulations further comprise surfactants. Protein molecules may be susceptible to adsorption on surfaces and to denaturation and consequent aggregation at air-liquid, solid-liquid, and liquid-liquid interfaces. These effects generally scale inversely with protein concentration. These deleterious interactions generally scale inversely with protein concentration and typically are exacerbated by physical agitation, such as that generated during the shipping and handling of a product. Surfactants routinely are used to prevent, minimize, or reduce surface adsorption. Useful surfactants in the invention in this regard include polysorbate 20, polysorbate 80, other fatty acid esters of sorbitan polyethoxylates, and poloxamer 188. Surfactants also are commonly used to control protein conformational stability. The use of surfactants in this regard is protein-specific since, any given surfactant typically will stabilize some proteins and destabilize others.

[0493] Polysorbates are susceptible to oxidative degradation and often, as supplied, contain sufficient quantities of peroxides to cause oxidation of protein residue side-chains, especially methionine. Consequently, polysorbates should be used carefully, and when used, should be employed at their lowest effective concentration. In this regard, polysorbates exemplify the general rule that excipients should be used in their lowest effective concentrations.

[0494] Embodiments of the antigen-binding molecule of the invention formulations further comprise one or more antioxidants. To some extent deleterious oxidation of proteins can be prevented in pharmaceutical formulations by maintaining proper levels of ambient oxygen and temperature and by avoiding exposure to light. Antioxidant excipients can be used as well to prevent oxidative degradation of proteins. Among useful antioxidants in this regard are reducing agents, oxygen/free-radical scavengers, and chelating agents. Antioxidants for use in therapeutic protein formulations in accordance with the invention preferably are water-soluble and maintain their activity throughout the shelf life of a product. EDTA is a preferred antioxidant in accordance with the invention in this regard. Antioxidants can damage proteins. For instance, reducing agents, such as glutathione in particular, can disrupt intramolecular disulfide linkages. Thus, antioxidants for use in the invention are selected to, among other things, eliminate or sufficiently reduce the possibility of themselves damaging proteins in the formulation.

[0495] Formulations in accordance with the invention may include metal ions that are protein co-factors and that are necessary to form protein coordination complexes, such as zinc necessary to form certain insulin suspensions. Metal ions also can inhibit some processes that degrade proteins. However, metal ions also catalyze physical and chemical processes that degrade proteins. Magnesium ions (10-120 mM) can be used to inhibit isomerization of aspartic acid to isoaspartic acid. Ca⁺² ions (up to 100 mM) can increase the stability of human deoxyribonuclease. Mg⁺², Mn⁺², and Zn⁺², however, can destabilize rhDNase. Similarly, Ca⁺² and Sr⁺² can stabilize Factor VIII, it can be destabilized by Mg⁺², Mn⁺² and Zn⁺², Cu⁺² and Fe⁺², and its aggregation can be increased by Al⁺³ ions.

[0496] Embodiments of the antigen-binding molecule of the invention formulations further comprise one or more preservatives. Preservatives are necessary when developing multi-dose parenteral formulations that involve more than one extraction from the same container. Their primary function is to inhibit microbial growth and ensure product sterility throughout the shelf-life or term of use of the drug product. Commonly used preservatives include benzyl alcohol, phenol and m-cresol. Although preservatives have a long history of use with small-molecule parenterals, the development of protein formulations that includes preservatives can be challenging. Preservatives almost always have a destabilizing effect (aggregation) on proteins, and this has become a major factor in limiting their use in multi-dose protein formulations. To date, most protein drugs have been formulated for single-use only. However, when multi-dose formulations are possible, they have the added advantage of enabling patient convenience, and increased marketability. A good example is that of human growth hormone (hGH) where the development of preserved formulations has led to commercialization of more convenient, multi-use injection pen presentations. At least four such pen devices containing preserved formulations of hGH are currently available on the market. Norditropin (liquid, Novo Nordisk), Nutropin AQ (liquid, Genentech) & Genotropin (lyophilized-dual chamber cartridge, Pharmacia & Upjohn) contain phenol while Somatrope (Eli Lilly) is formulated with m-cresol. Several aspects need to be considered during the formulation and development of preserved dosage forms. The effective preservative concentration in the drug product must be optimized. This requires testing a given preservative in the dosage form with concentration ranges that confer anti-microbial effectiveness without compromising protein stability.

[0497] As may be expected, development of liquid formulations containing preservatives are more challenging than lyophilized formulations. Freeze-dried products can be lyophilized without the preservative and reconstituted with a preservative containing diluent at the time of use. This shortens the time for which a preservative is in contact with the protein, significantly minimizing the associated stability risks. With liquid formulations, preservative effectiveness and stability should be maintained over the entire product shelf-life (about 18 to 24 months). An important point to note is that preservative effectiveness should be demonstrated in the final formulation containing the active drug and all excipient components.

[0498] The antigen-binding molecules disclosed herein may also be formulated as immuno-liposomes. A “liposome” is a small vesicle composed of various types of lipids, phospholipids and/or surfactant which is useful for delivery of a drug to a mammal. The components of the liposome are commonly arranged in a bilayer formation, similar to the lipid arrangement of biological membranes. Liposomes containing the antigen-binding molecule are prepared by methods known in the art, such as described in Epstein et al., Proc. Natl. Acad. Sci. USA, 82: 3688 (1985); Hwang et al., Proc. Natl Acad. Sci. USA, 77: 4030 (1980); U.S. Pat. Nos. 4,485,045 and 4,544,545; and WO 97/38731. Liposomes with enhanced circulation time are disclosed in U.S. Pat. No. 5,013,556. Particularly useful liposomes can be generated by the reverse phase evaporation method with a lipid composition comprising phosphatidylcholine, cholesterol and PEG-derivatized phosphatidylethanolamine (PEG-PE). Liposomes are extruded through filters of defined pore size to yield liposomes with the desired diameter. Fab′ fragments of the antigen-binding molecule of the present invention can be conjugated to the liposomes as described in Martin et al. J. Biol. Chem. 257: 286-288 (1982) via a disulfide interchange reaction. A chemotherapeutic agent is optionally contained within the liposome. See Gabizon et al. J. National Cancer Inst. 81 (19) 1484 (1989).

[0499] Once the pharmaceutical composition has been formulated, it may be stored in sterile vials as a solution, suspension, gel, emulsion, solid, crystal, or as a dehydrated or lyophilized powder. Such formulations may be stored either in a ready-to-use form or in a form (e.g., lyophilized) that is reconstituted prior to administration.

[0500] The biological activity of the pharmaceutical composition defined herein can be determined for instance by cytotoxicity assays, as described in the following examples, in WO 99/54440 or by Schlereth et al. (Cancer Immunol. Immunother. 20 (2005), 1-12). “Efficacy” or “in vivo efficacy” as used herein refers to the response to therapy by the pharmaceutical composition of the invention, using e.g. standardized NCI response criteria. The success or in vivo efficacy of the therapy using a pharmaceutical composition of the invention refers to the effectiveness of the composition for its intended purpose, i.e. the ability of the composition to cause its desired effect, i.e. depletion of pathologic cells, e.g. tumor cells. The in vivo efficacy may be monitored by established standard methods for the respective disease entities including, but not limited to white blood cell counts, differentials, Fluorescence Activated Cell Sorting, bone marrow aspiration. In addition, various disease specific clinical chemistry parameters and other established standard methods may be used. Furthermore, computer-aided tomography, X-ray, nuclear magnetic resonance tomography (e.g. for National Cancer Institute-criteria based response assessment [Cheson B D, Horning S J, Coiffier B, Shipp M A, Fisher R I, Connors J M, Lister T A, Vose J, Grillo-Lopez A, Hagenbeek A, Cabanillas F, Klippensten D. Hiddemann W, Castellino R, Harris N L, Armitage J O, Carter W, Hoppe R, Canellos G P. Report of an international workshop to standardize response criteria for non-Hodgkin's lymphomas. NCI Sponsored International Working Group. J Clin Oncol. 1999 April; 17(4): 1244]), positron-emission tomography scanning, white blood cell counts, differentials, Fluorescence Activated Cell Sorting, bone marrow aspiration, lymph node biopsies/histologies, and various lymphoma specific clinical chemistry parameters (e.g. lactate dehydrogenase) and other established standard methods may be used.

[0501] Another major challenge in the development of drugs such as the pharmaceutical composition of the invention is the predictable modulation of pharmacokinetic properties. To this end, a pharmacokinetic profile of the drug candidate, i.e. a profile of the pharmacokinetic parameters that affect the ability of a particular drug to treat a given condition, can be established. Pharmacokinetic parameters of the drug influencing the ability of a drug for treating a certain disease entity include, but are not limited to: half-life, volume of distribution, hepatic first-pass metabolism and the degree of blood serum binding. The efficacy of a given drug agent can be influenced by each of the parameters mentioned above. It is an envisaged characteristic of the antigen-binding molecules of the present invention provided with the specific FC modality that they comprise, for example, differences in pharmacokinetic behavior. A half-life extended targeting antigen-binding molecule according to the present invention preferably shows a surprisingly increased residence time in vivo in comparison to “canonical” non-HLE versions of said antigen-binding molecule.

[0502] “Half-life” means the time where 50% of an administered drug are eliminated through biological processes, e.g. metabolism, excretion, etc. By “hepatic first-pass metabolism” is meant the propensity of a drug to be metabolized upon first contact with the liver, i.e. during its first pass through the liver. “Volume of distribution” means the degree of retention of a drug throughout the various compartments of the body, like e.g. intracellular and extracellular spaces, tissues and organs, etc. and the distribution of the drug within these compartments. “Degree of blood serum binding” means the propensity of a drug to interact with and bind to blood serum proteins, such as albumin, leading to a reduction or loss of biological activity of the drug.

[0503] Pharmacokinetic parameters also include bioavailability, lag time (Tlag), Tmax, absorption rates, more onset and/or Cmax for a given amount of drug administered. “Bioavailability” means the amount of a drug in the blood compartment. “Lag time” means the time delay between the administration of the drug and its detection and measurability in blood or plasma. “Tmax” is the time after which maximal blood concentration of the drug is reached, and “Cmax” is the blood concentration maximally obtained with a given drug. The time to reach a blood or tissue concentration of the drug which is required for its biological effect is influenced by all parameters. Pharmacokinetic parameters of bispecific antigen-binding molecules exhibiting cross-species specificity, which may be determined in preclinical animal testing in non-chimpanzee primates as outlined above, are also set forth e.g. in the publication by Schlereth et al. (Cancer Immunol. Immunother. 20 (2005), 1-12).

[0504] In a preferred aspect of the invention the pharmaceutical composition is stable for at least four weeks at about −20° C. As apparent from the appended examples the quality of an antigen-binding molecule of the invention vs. the quality of corresponding state of the art antigen-binding molecules may be tested using different systems. Those tests are understood to be in line with the “ICH Harmonised Tripartite Guideline: Stability Testing of Biotechnological/Biological Products Q5C and Specifications: Test procedures and Acceptance Criteria for Biotech Biotechnological/Biological Products Q6B” and, thus are elected to provide a stability-indicating profile that provides certainty that changes in the identity, purity and potency of the product are detected. It is well accepted that the term purity is a relative term. Due to the effect of glycosylation, deamidation, or other heterogeneities, the absolute purity of a biotechnological/biological product should be typically assessed by more than one method and the purity value derived is method-dependent. For the purpose of stability testing, tests for purity should focus on methods for determination of degradation products.

[0505] For the assessment of the quality of a pharmaceutical composition comprising an antigen-binding molecule of the invention may be analyzed e.g. by analyzing the content of soluble aggregates in a solution (HMWS per size exclusion). It is preferred that stability for at least four weeks at about −20° C. is characterized by a content of less than 1.5% HMWS, preferably by less than 1% HMWS.

[0506] A preferred formulation for the antigen-binding molecule as a pharmaceutical composition may e.g. comprise the components of a formulation as described below:
[0507] Formulation:
   [0508] potassium phosphate, L-arginine hydrochloride, trehalose dihydrate, polysorbate 80 at pH 6.0

[0509] Other examples for the assessment of the stability of an antigen-binding molecule of the invention in form of a pharmaceutical composition are provided in the appended examples 4-12. In those examples embodiments of antigen-binding molecules of the invention are tested with respect to different stress conditions in different pharmaceutical formulations and the results compared with other half-life extending (HLE) formats of bispecific T cell engaging antigen-binding molecule known from the art. In general, it is envisaged that antigen-binding molecules provided with the specific FC modality according to the present invention are typically more stable over a broad range of stress conditions such as temperature and light stress, both compared to antigen-binding molecules provided with different HLE formats and without any HLE format (e.g. “canonical” antigen-binding molecules). Said temperature stability may relate both to decreased (below room temperature including freezing) and increased (above room temperature including temperatures up to or above body temperature) temperature. As the person skilled in the art will acknowledge, such improved stability with regard to stress, which is hardly avoidable in clinical practice, makes the antigen-binding molecule safer because less degradation products will occur in clinical practice. In consequence, said increased stability means increased safety.

[0510] One embodiment provides the antigen-binding molecule of the invention or the antigen-binding molecule produced according to the process of the invention for use in the prevention, treatment or amelioration of a cancer correlating with, CD20, CD22, FLT3, CLL1, CHD3, MSLN, or EpCAM expression or CD20, CD22, FLT3, CLL1, CHD3, MSLN, or EpCAM overexpression, such as prostate cancer.

[0511] The formulations described herein are useful as pharmaceutical compositions in the treatment, amelioration and/or prevention of the pathological medical condition as described herein in a patient in need thereof. The term “treatment” refers to both therapeutic treatment and prophylactic or preventative measures. Treatment includes the application or administration of the formulation to the body, an isolated tissue, or cell from a patient who has a disease/disorder, a symptom of a disease/disorder, or a predisposition toward a disease/disorder, with the purpose to cure, heal, alleviate, relieve, alter, remedy, ameliorate, improve, or affect the disease, the symptom of the disease, or the predisposition toward the disease.

[0512] The term “amelioration” as used herein refers to any improvement of the disease state of a patient having a disease as specified herein below, by the administration of an antigen-binding molecule according to the invention to a subject in need thereof. Such an improvement may also be seen as a slowing or stopping of the progression of the patient's disease. The term “prevention” as used herein means the avoidance of the occurrence or re-occurrence of a patient having a tumor or cancer or a metastatic cancer as specified herein below, by the administration of an antigen-binding molecule according to the invention to a subject in need thereof.

[0513] The term “disease” refers to any condition that would benefit from treatment with the antigen-binding molecule or the pharmaceutic composition described herein. This includes chronic and acute disorders or diseases including those pathological conditions that predispose the mammal to the disease in question.

[0514] A “neoplasm” is an abnormal growth of tissue, usually but not always forming a mass. When also forming a mass, it is commonly referred to as a “tumor”. Neoplasms or tumors or can be benign, potentially malignant (pre-cancerous), or malignant. Malignant neoplasms are commonly called cancer. They usually invade and destroy the surrounding tissue and may form metastases, i.e., they spread to other parts, tissues or organs of the body. Hence, the term “metastatic cancer” encompasses metastases to other tissues or organs than the one of the original tumor. Lymphomas and leukemias are lymphoid neoplasms. For the purposes of the present invention, they are also encompassed by the terms “tumor” or “cancer”.

[0515] The term “viral disease” describes diseases, which are the result of a viral infection of a subject.

[0516] The term “immunological disorder” as used herein describes in line with the common definition of this term immunological disorders such as autoimmune diseases, hypersensitivities, immune deficiencies.

[0517] In one embodiment the invention provides a method for the treatment or amelioration of a cancer correlating with CS1, BCMA, CD20, CD22, FLT3, CD123, CLL1, CHD3, MSLN, or EpCAM expression or CS1, BCMA, CD20, CD22, FLT3, CD123, CLL1, CHD3, MSLN, or EpCAM overexpression, comprising the step of administering to a subject in need thereof the antigen-binding molecule of the invention, or the antigen-binding molecule produced according to the process of the invention. The CS1, BCMA, CD20, CD22, FLT3, CD123, CLL1, CHD3, MSLN, or EpCAMxCD3 bispecific single chain antibody is particularly advantageous for the therapy of cancer, preferably solid tumors, more preferably carcinomas and prostate cancer.

[0518] The terms “subject in need” or those “in need of treatment” includes those already with the disorder, as well as those in which the disorder is to be prevented. The subject in need or “patient” includes human and other mammalian subjects that receive either prophylactic or therapeutic treatment.

[0519] The antigen-binding molecule of the invention will generally be designed for specific routes and methods of administration, for specific dosages and frequencies of administration, for specific treatments of specific diseases, with ranges of bio-availability and persistence, among other things. The materials of the composition are preferably formulated in concentrations that are acceptable for the site of administration.

[0520] Formulations and compositions thus may be designed in accordance with the invention for delivery by any suitable route of administration. In the context of the present invention, the routes of administration include, but are not limited to
[0521] topical routes (such as epicutaneous, inhalational, nasal, opthalmic, auricular/aural, vaginal, mucosal);
[0522] enteral routes (such as oral, gastrointestinal, sublingual, sublabial, buccal, rectal); and
[0523] parenteral routes (such as intravenous, intraarterial, intraosseous, intramuscular, intracerebral, intracerebroventricular, epidural, intrathecal, subcutaneous, intraperitoneal, extra-amniotic, intraarticular, intracardiac, intradermal, intralesional, intrauterine, intravesical, intravitreal, transdermal, intranasal, transmucosal, intrasynovial, intraluminal).

[0524] The pharmaceutical compositions and the antigen-binding molecule of this invention are particularly useful for parenteral administration, e.g., subcutaneous or intravenous delivery, for example by injection such as bolus injection, or by infusion such as continuous infusion. Pharmaceutical compositions may be administered using a medical device. Examples of medical devices for administering pharmaceutical compositions are described in U.S. Pat. Nos. 4,475,196; 4,439,196; 4,447,224; 4,447, 233; 4,486,194; 4,487,603; 4,596,556; 4,790,824; 4,941,880; 5,064,413; 5,312,335; 5,312,335; 5,383,851; and 5,399,163.

[0525] In particular, the present invention provides for an uninterrupted administration of the suitable composition. As a non-limiting example, uninterrupted or substantially uninterrupted, i.e. continuous administration may be realized by a small pump system worn by the patient for metering the influx of therapeutic agent into the body of the patient. The pharmaceutical composition comprising the antigen-binding molecule of the invention can be administered by using said pump systems. Such pump systems are generally known in the art, and commonly rely on periodic exchange of cartridges containing the therapeutic agent to be infused. When exchanging the cartridge in such a pump system, a temporary interruption of the otherwise uninterrupted flow of therapeutic agent into the body of the patient may ensue. In such a case, the phase of administration prior to cartridge replacement and the phase of administration following cartridge replacement would still be considered within the meaning of the pharmaceutical means and methods of the invention together make up one “uninterrupted administration” of such therapeutic agent.

[0526] The continuous or uninterrupted administration of the antigen-binding molecules of the invention may be intravenous or subcutaneous by way of a fluid delivery device or small pump system including a fluid driving mechanism for driving fluid out of a reservoir and an actuating mechanism for actuating the driving mechanism. Pump systems for subcutaneous administration may include a needle or a cannula for penetrating the skin of a patient and delivering the suitable composition into the patient's body. Said pump systems may be directly fixed or attached to the skin of the patient independently of a vein, artery or blood vessel, thereby allowing a direct contact between the pump system and the skin of the patient. The pump system can be attached to the skin of the patient for 24 hours up to several days. The pump system may be of small size with a reservoir for small volumes. As a non-limiting example, the volume of the reservoir for the suitable pharmaceutical composition to be administered can be between 0.1 and 50 ml.

[0527] The continuous administration may also be transdermal by way of a patch worn on the skin and replaced at intervals. One of skill in the art is aware of patch systems for drug delivery suitable for this purpose. It is of note that transdermal administration is especially amenable to uninterrupted administration, as exchange of a first exhausted patch can advantageously be accomplished simultaneously with the placement of a new, second patch, for example on the surface of the skin immediately adjacent to the first exhausted patch and immediately prior to removal of the first exhausted patch. Issues of flow interruption or power cell failure do not arise.

[0528] If the pharmaceutical composition has been lyophilized, the lyophilized material is first reconstituted in an appropriate liquid prior to administration. The lyophilized material may be reconstituted in, e.g., bacteriostatic water for injection (BWFI), physiological saline, phosphate buffered saline (PBS), or the same formulation the protein had been in prior to lyophilization.

[0529] The compositions of the present invention can be administered to the subject at a suitable dose which can be determined e.g. by dose escalating studies by administration of increasing doses of the antigen-binding molecule of the invention exhibiting cross-species specificity described herein to non-chimpanzee primates, for instance macaques. As set forth above, the antigen-binding molecule of the invention exhibiting cross-species specificity described herein can be advantageously used in identical form in preclinical testing in non-chimpanzee primates and as drug in humans.

[0530] The term “effective dose” or “effective dosage” is defined as an amount sufficient to achieve or at least partially achieve the desired effect. The term “therapeutically effective dose” is defined as an amount sufficient to cure or at least partially arrest the disease and its complications in a patient already suffering from the disease. Amounts or doses effective for this use will depend on the condition to be treated (the indication), the delivered antigen-binding molecule, the therapeutic context and objectives, the severity of the disease, prior therapy, the patient's clinical history and response to the therapeutic agent, the route of administration, the size (body weight, body surface or organ size) and/or condition (the age and general health) of the patient, and the general state of the patient's own immune system.

[0531] A typical dosage may range from about 0.1 μg/kg to up to about 30 mg/kg or more, depending on the factors mentioned above. In specific embodiments, the dosage may range from 1.0 μg/kg up to about 20 mg/kg, optionally from 10 μg/kg up to about 10 mg/kg or from 100 μg/kg up to about 5 mg/kg.

[0532] A therapeutic effective amount of an antigen-binding molecule of the invention preferably results in a decrease in severity of disease symptoms, an increase in frequency or duration of disease symptom-free periods or a prevention of impairment or disability due to the disease affliction. For treating diseases correlating with CS1, BCMA, CD20, CD22, FLT3, CD123, CLL1, CHD3, MSLN, or EpCAM expression as described herein above, a therapeutically effective amount of the antigen-binding molecule of the invention, here: an anti-CS1, BCMA, CD20, CD22, FLT3, CD123, CLL1, CHD3, MSLN, or EpCAM/anti-CD3 antigen-binding molecule, preferably inhibits cell growth or tumor growth by at least about 20%, at least about 40%, at least about 50%, at least about 60%, at least about 70%, at least about 80%, or at least about 90% relative to untreated patients. The ability of a compound to inhibit tumor growth may be evaluated in an animal model predictive of efficacy

[0533] The pharmaceutical composition can be administered as a sole therapeutic or in combination with additional therapies such as anti-cancer therapies as needed, e.g. other proteinaceous and non-proteinaceous drugs. These drugs may be administered simultaneously with the composition comprising the antigen-binding molecule of the invention as defined herein or separately before or after administration of said antigen-binding molecule in timely defined intervals and doses.

[0534] The term “effective and non-toxic dose” as used herein refers to a tolerable dose of an inventive antigen-binding molecule which is high enough to cause depletion of pathologic cells, tumor elimination, tumor shrinkage or stabilization of disease without or essentially without major toxic effects. Such effective and non-toxic doses may be determined e.g. by dose escalation studies described in the art and should be below the dose inducing severe adverse side events (dose limiting toxicity, DLT).

[0535] The term “toxicity” as used herein refers to the toxic effects of a drug manifested in adverse events or severe adverse events. These side events may refer to a lack of tolerability of the drug in general and/or a lack of local tolerance after administration. Toxicity could also include teratogenic or carcinogenic effects caused by the drug.

[0536] The term “safety”, “in vivo safety” or “tolerability” as used herein defines the administration of a drug without inducing severe adverse events directly after administration (local tolerance) and during a longer period of application of the drug. “Safety”, “in vivo safety” or “tolerability” can be evaluated e.g. at regular intervals during the treatment and follow-up period. Measurements include clinical evaluation, e.g. organ manifestations, and screening of laboratory abnormalities. Clinical evaluation may be carried out and deviations to normal findings recorded/coded according to NCI-CTC and/or MedDRA standards. Organ manifestations may include criteria such as allergy/immunology, blood/bone marrow, cardiac arrhythmia, coagulation and the like, as set forth e.g. in the Common Terminology Criteria for adverse events v3.0 (CTCAE). Laboratory parameters which may be tested include for instance hematology, clinical chemistry, coagulation profile and urine analysis and examination of other body fluids such as serum, plasma, lymphoid or spinal fluid, liquor and the like. Safety can thus be assessed e.g. by physical examination, imaging techniques (i.e. ultrasound, x-ray, CT scans, Magnetic Resonance Imaging (MRI), other measures with technical devices (i.e. electrocardiogram), vital signs, by measuring laboratory parameters and recording adverse events. For example, adverse events in non-chimpanzee primates in the uses and methods according to the invention may be examined by histopathological and/or histochemical methods.

[0537] The above terms are also referred to e.g. in the Preclinical safety evaluation of biotechnology-derived pharmaceuticals S6; ICH Harmonised Tripartite Guideline; ICH Steering Committee meeting on Jul. 16, 1997.

[0538] Finally, the invention provides a kit comprising an antigen-binding molecule of the invention or produced according to the process of the invention, a pharmaceutical composition of the invention, a polynucleotide of the invention, a vector of the invention and/or a host cell of the invention.

[0539] In the context of the present invention, the term “kit” means two or more components—one of which corresponding to the antigen-binding molecule, the pharmaceutical composition, the vector or the host cell of the invention—packaged together in a container, recipient or otherwise. A kit can hence be described as a set of products and/or utensils that are sufficient to achieve a certain goal, which can be marketed as a single unit.

[0540] The kit may comprise one or more recipients (such as vials, ampoules, containers, syringes, bottles, bags) of any appropriate shape, size and material (preferably waterproof, e.g. plastic or glass) containing the antigen-binding molecule or the pharmaceutical composition of the present invention in an appropriate dosage for administration (see above). The kit may additionally contain directions for use (e.g. in the form of a leaflet or instruction manual), means for administering the antigen-binding molecule of the present invention such as a syringe, pump, infuser or the like, means for reconstituting the antigen-binding molecule of the invention and/or means for diluting the antigen-binding molecule of the invention.

[0541] The invention also provides kits for a single-dose administration unit. The kit of the invention may also contain a first recipient comprising a dried/lyophilized antigen-binding molecule and a second recipient comprising an aqueous formulation. In certain embodiments of this invention, kits containing single-chambered and multi-chambered pre-filled syringes (e.g., liquid syringes and lyosyringes) are provided.

[0542] It is noted that as used herein, the singular forms “a”, “an”, and “the”, include plural references unless the context clearly indicates otherwise. Thus, for example, reference to “a reagent” includes one or more of such different reagents and reference to “the method” includes reference to equivalent steps and methods known to those of ordinary skill in the art that could be modified or substituted for the methods described herein.

[0543] Unless otherwise indicated, the term “at least” preceding a series of elements is to be understood to refer to every element in the series. Those skilled in the art will recognize, or be able to ascertain using no more than routine experimentation, many equivalents to the specific embodiments of the invention described herein. Such equivalents are intended to be encompassed by the present invention.

[0544] The term “and/or” wherever used herein includes the meaning of “and”, “or” and “all or any other combination of the elements connected by said term”.

[0545] The term “about” or “approximately” as used herein means within 20%, preferably within 10%, and more preferably within 5% of a given value or range. It includes, however, also the concrete number, e.g., about 20 includes 20.

[0546] The term “less than” or “greater than” includes the concrete number. For example, less than 20 means less than or equal to. Similarly, more than or greater than means more than or equal to, or greater than or equal to, respectively.

[0547] Throughout this specification and the claims which follow, unless the context requires otherwise, the word “comprise”, and variations such as “comprises” and “comprising”, will be understood to imply the inclusion of a stated integer or step or group of integers or steps but not the exclusion of any other integer or step or group of integer or step. When used herein the term “comprising” can be substituted with the term “containing” or “including” or sometimes when used herein with the term “having”.

[0548] When used herein “consisting of” excludes any element, step, or ingredient not specified in the claim element. When used herein, “consisting essentially of” does not exclude materials or steps that do not materially affect the basic and novel characteristics of the claim.

[0549] In each instance herein any of the terms “comprising”, “consisting essentially of” and “consisting of” may be replaced with either of the other two terms.

[0550] It should be understood that this invention is not limited to the particular methodology, protocols, material, reagents, and substances, etc., described herein and as such can vary. The terminology used herein is for the purpose of describing particular embodiments only, and is not intended to limit the scope of the present invention, which is defined solely by the claims.

[0551] All publications and patents cited throughout the text of this specification (including all patents, patent applications, scientific publications, manufacturer's specifications, instructions, etc.), whether supra or infra, are hereby incorporated by reference in their entirety. Nothing herein is to be construed as an admission that the invention is not entitled to antedate such disclosure by virtue of prior invention. To the extent the material incorporated by reference contradicts or is inconsistent with this specification, the specification will supersede any such material.

[0552] A better understanding of the present invention and of its advantages will be obtained from the following examples, offered for illustrative purposes only. The examples are not intended to limit the scope of the present invention in any way.

### EXAMPLES

### Example 1: Luciferase-Based Cytotoxicity Assay with Unstimulated Human PBMC on Multitargeting Bispecific Antigen-Binding Molecules to Determine Beneficial Efficacy Gap

### Isolation of Effector Cells

[0553] Human peripheral blood mononuclear cells (PBMC) were prepared by Ficoll density gradient centrifugation from enriched lymphocyte preparations (buffy coats), a side product of blood banks collecting blood for transfusions. Buffy coats were supplied by a local blood bank and PBMC were prepared on the day after blood collection. After Ficoll density centrifugation and extensive washes with Dulbecco's PBS (Gibco), remaining erythrocytes were removed from PBMC via incubation with erythrocyte lysis buffer (155 mM NH₄Cl, 10 mM KHCO₃, 100 μM EDTA). Remaining lymphocytes mainly encompass B and T lymphocytes, NK cells and monocytes. PBMC were kept in culture at 37° C./5% CO₂ in RPMI medium (Gibco) with 10% FCS (Gibco).

Depletion of CD14⁺ and CD56⁺ Cells

[0554] For depletion of CD14⁺ cells, human CD14 MicroBeads (Milteny Biotec, MACS, #130-050-201) were used, for depletion of NK cells human CD56 MicroBeads (MACS, #130-050-401). PBMC were counted and centrifuged for 10 min at room temperature with 300×g. The supernatant was discarded and the cell pellet resuspended in MACS isolation buffer (60 μL/10⁷ cells). CD14 MicroBeads and CD56 MicroBeads (20 μL/10⁷ cells) were added and incubated for 15 min at 4-8° C. The cells were washed with AutoMACS rinsing buffer (Milteny #130-091-222) (1-2 mL/10⁷ cells). After centrifugation (see above), supernatant was discarded and cells resuspended in MACS isolation buffer (500 μL/10⁸ cells). CD14/CD56 negative cells were then isolated using LS Columns (Milteny Biotec, #130-042-401). PBMC w/o CD14+/CD56+ cells were adjusted to 1.2×10⁶ cells/mL and cultured in RPMI complete medium i.e. RPMI1640 (Biochrom AG, #FG1215) supplemented with 10% FBS (Bio West, #S1810), 1× non-essential amino acids (Biochrom AG, #K0293), 10 mM Hepes buffer (Biochrom AG, #L1613), 1 mM sodium pyruvate (Biochrom AG, #L0473) and 100 U/mL penicillin/streptomycin (Biochrom AG, #A2213) at 37° C. in an incubator until needed.

### Target Cell Preparation

[0555] Cells were harvested, spinned down and adjusted to 1.2×10⁵ cells/mL in complete RPMI medium. The vitality of cells was determined using Nucleocounter NC-250 (Chemometec) and Solution18 Dye containing Acridine Orange and DAPI (Chemometec).

### Luciferase Based Analysis

[0556] This assay was designed to quantify the lysis of target cells in the presence of serial dilutions of multi-specific antigen-binding molecules. Equal volumes of Luciferase-positive target cells and effector cells (i.e., PBMC w/o CD14+; CD56+ cells) were mixed, resulting in an E:T cell ratio of 10:1. 42 μL of this suspension were transferred to each well of a 384-well plate. 8 μL of serial dilutions of the corresponding multi-specific antigen-binding molecules and a negative control antigen-binding molecules (a CD3-based antigen-binding molecule recognizing an irrelevant target antigen) or RPMI complete medium as an additional negative control were added. The multi-specific antibody-mediated cytotoxic reaction proceeded for 48 hours in a 5% CO₂ humidified incubator. Then 25 μL substrate (Steady-Glo® Reagent, Promega) were transferred to the 384-well plate. Only living, Luciferase-positive cells react to the substrate and thus create a luminescence signal. Samples were measured with a SPARK microplate reader (TECAN) and analyzed by Spark Control Magellan software (TECAN).

[0557] Percentage of cytotoxicity was calculated as follows:

$$Cytoxicity [ \% ] = ( 1 - \frac{{RLU}_{Sample}}{{RLU}_{Negative ‐ Control}} ) \times 100$$

$$RLU = relative light units$$

$$Negative ‐ Control = cells without multi ‐ specific antigen ‐ binding molecule$$

[0558] Using GraphPad Prism 7.04 software (Graph Pad Software, San Diego), the percentage of cytotoxicity was plotted against the corresponding multi-specific antigen-binding molecule concentrations. Dose response curves were analyzed with the four parametric logistic regression models for evaluation of sigmoid dose response curves with fixed hill slope and EC50 values were calculated.

[0559] The following mono and double target expressing cell lines were used for the Luciferase-based cytotoxicity assay:
[0560] GSU-LUC wt (CDH3+ and MSLN+)
[0561] GSU-LUC KO CDH3 (CDH3− and MSLN+)
[0562] GSU-LUC KO MSLN (CDH3+ and MSLN−)
[0563] HCT 116-LUC wt (CDH3+ and MSLN+)
[0564] HCT 116-LUC KO CDH3 (CDH3− and MSLN+)
[0565] HCT 116-LUC KO MSLN (CDH3+ and MSLN−)

TABLE 4
Overiew on MSLN-CDH3 T-cell engaging
cytotoxicity assays on 9 different test molecules
A) Effector cells: human unstimulated T cells
Target cells: GSU wt, GSU KO CDH3, GSU KO MSLN

| | EC50 |
|---|---|
| | [pM] |
| MSLN-CDH3 T-cell engager molecule 1 on GSU wt | 0.151 |
| MSLN-CDH3 T-cell engager molecule 1 on GSU KO CDH3 | 339 |
| MSLN-CDH3 T-cell engager molecule 1 on GSU KO MSLN | 256 |
| MSLN-CDH3 T-cell engager molecule 2 on GSU wt | 1.389 |
| MSLN-CDH3 T-cell engager molecule 2 on GSU KO CDH3 | 2900 |
| MSLN-CDH3 T-cell engager molecule 2 on GSU KO MSLN | 1725 |
| MSLN-CDH3 T-cell engager molecule 3 on GSU wt | 0.556 |
| MSLN-CDH3 T-cell engager molecule 3 on GSU KO CDH3 | 115 |
| MSLN-CDH3 T-cell engager molecule 3 on GSU KO MSLN | 502 |
| MSLN-CDH3 T-cell engager molecule 4 on GSU wt | 1.489 |
| MSLN-CDH3 T-cell engager molecule 4 on GSU KO CDH3 | 315 |
| MSLN-CDH3 T-cell engager molecule 4 on GSU KO MSLN | 7657 |
| MSLN-CDH3 T-cell engager molecule 5 on GSU wt | 0.920 |
| MSLN-CDH3 T-cell engager molecule 5 on GSU KO CDH3 | 171 |
| MSLN-CDH3 T-cell engager molecule 5 on GSU KO MSLN | 3328 |
| MSLN-CDH3 T-cell engager molecule 6 on GSU wt | 1.334 |
| MSLN-CDH3 T-cell engager molecule 6 on GSU KO CDH3 | 512 |
| MSLN-CDH3 T-cell engager molecule 6 on GSU KO MSLN | 3243 |
| MSLN-CDH3 T-cell engager molecule 7 on GSU wt | 0.042 |
| MSLN-CDH3 T-cell engager molecule 7 on GSU KO CDH3 | 69.9 |
| MSLN-CDH3 T-cell engager molecule 7 on GSU KO MSLN | 7.9 |
| MSLN-CDH3 T-cell engager molecule 8 on GSU wt | 0.865 |
| MSLN-CDH3 T-cell engager molecule 8 on GSU KO CDH3 | 91.5 |
| MSLN-CDH3 T-cell engager molecule 8 on GSU KO MSLN | 136 |
| MSLN-CDH3 T-cell engager molecule 9 on GSU wt | 0.575 |
| MSLN-CDH3 T-cell engager molecule 9 on GSU KO CDH3 | 156 |
| MSLN-CDH3 T-cell engager molecule 9 on GSU KO MSLN | 2626 |
| MSLN T-cell engager molecule on GSU wt | 857 |
| MSLN T-cell engager molecule on GSU KO CDH3 | 760 |
| MSLN T-cell engager molecule on GSU KO MSLN | 16251 |
| CDH3 T-cell engager molecule on GSU wt | 262 |
| CDH3 T-cell engager molecule on GSU KO CDH3 | 328 |
| CDH3 T-cell engager molecule on GSU KO MSLN | 164 |
| EGFRvIII T-cell engager molecule on GSU wt | n/a |
| EGFRvIII T-cell engager molecule on GSU KO CDH3 | n/a |
| EGFRvIII T-cell engager molecule on GSU KO MSLN | n/a |

MSLN-CDH3 T-cell engager molecule 1: MS 15-B12 CC × I2L × G4 × scFc × G4 × CH3 15-E11 CC × I2L
MSLN-CDH3 T-cell engager molecule 2: MS 15-B12 CC × I2L × (G4Q)3 × scFc × (G4Q)3 × CH3 15-E11 CC × I2L
MSLN-CDH3 T-cell engager molecule 3: MS 15-B12 CC × I2L × G4 × scFc × G4 × CH3 15-E11 CC × I2L_GQ
MSLN-CDH3 T-cell engager molecule 4: CH3 15-E11 CC × I2L × (G4S)3 × scFc × (G4S)3 × MS 15-B12 CC × I2L
MSLN-CDH3 T-cell engager molecule 5: CH3 15-E11 CC × I2L × (G4Q)3 × scFc × (G4Q)3 × MS 15-B12 CC × I2L
MSLN-CDH3 T-cell engager molecule 6: CH3 15-E11 CC × I2L × G4 × scFc × G4 × MS 15-B12 CC × I2L_GQ
MSLN-CDH3 T-cell engager molecule 7: MS 15-B12 CC × I2M2 × (G4S)3 × scFc × (G4S)3 × CH3 15-E11 CC × I2M2
MSLN-CDH3 T-cell engager molecule 8: CH3 15-E11 CC × I2M2 × (G4S)3 × scFc × (G4S)3 × MS 15-B12 CC × I2M2
MSLN-CDH3 T-cell engager molecule 9: MS 15-B12 CC × I2M2 × G4 × scFc × G4 × CH3 005-D5 CC × I2M2
MSLN T-cell engager molecule (MSLN only binding): MS 5-F11 × I2C0 × scFc
CDH3 T-cell engager molecule (CDH3 only binding): CH3 G8A 6-B12 × I2C0 × scFc
EGFRvIII T-cell engager molecule (non-binding): EGFRvIII CC × I2C0 × scFc

### Detailed Results Indicating Efficacy Gaps:

TABLE 5
EC50 values in pM and gaps of naïve GSU cells versus knock-out GSU cells

| | EC50 GSU | | | | EC50 GSU |
|---|---|---|---|---|---|
| | KO MSLN | fold | EC50 GSU | fold | KO CDH3 |
| | [pM] | gap | wt [pM] | gap | [pM] |
| MSLN-CDH3 T-cell | 256 | 1695 | 0.151 | 2245 | 339 |
| engager molecule 1 | | | | | |
| MSLN-CDH3 T-cell | 1725 | 1242 | 1.389 | 2088 | 2900 |
| engager molecule 2 | | | | | |
| MSLN-CDH3 T-cell | 502 | 903 | 0.556 | 207 | 115 |
| engager molecule 3 | | | | | |
| MSLN-CDH3 T-cell | 7657 | 5142 | 1.489 | 212 | 315 |
| engager molecule 4 | | | | | |
| MSLN-CDH3 T-cell | 3328 | 3617 | 0.92 | 186 | 171 |
| engager molecule 5 | | | | | |
| MSLN-CDH3 T-cell | 3243 | 2429 | 1.335 | 384 | 512 |
| engager molecule 6 | | | | | |
| MSLN-CDH3 T-cell | 7.9 | 187 | 0.042 | 1664 | 69.9 |
| engager molecule 7 | | | | | |
| MSLN-CDH3 T-cell | 136 | 157 | 0.865 | 106 | 91.5 |
| engager molecule 8 | | | | | |
| MSLN-CDH3 T-cell | 2626 | 4567 | 0.575 | 271 | 156 |
| engager molecule 9 | | | | | |
| MSLN T-cell | 16251 | 19.0 | 857 | 0.9 | 760 |
| engager molecule | | | | | |
| CDH3 T-cell | 164 | 0.6 | 262 | 1.3 | 328 |
| engager molecule | | | | | |
| EGFRvIII T-cell | n/a | n/a | n/a | n/a | n/a |
| engager molecule | | | | | |

The tested MSLN-CDH3 T-cell engager molecules 1-9 showed increased activity (lower EC50 values) on MSLN and CDH3 double positive GSU wt cells compared to respective GSU k.o cells (GSU CDH3 k.o and GSU MSLN k.o.). The MSLN-CDH3 T-cell engager molecules 1-9 showed EC50 gaps greater 100-fold on MSLN and CDH3 double positive GSU wt cells versus the respective GSU k.o cells (GSU CDH3 k.o and GSU MSLN k.o.) (Fig. A) and Table 5).

TABLE 6
Overview on the efficacy of 9 tested
molecules using the following cell lines:
Effector cells: human unstimulated T cells
Target cells: HCT 116 wt, HCT 116 KO CDH3, HCT 116 KO MSLN

| | EC50 |
|---|---|
| | [pM] |
| MSLN-CDH3 T-cell engager molecule 1 on HCT 116 wt | 0.0076 |
| MSLN-CDH3 T-cell engager molecule 1 on HCT 116 KO CDH3 | 18.3 |
| MSLN-CDH3 T-cell engager molecule 1 on HCT 116 KO MSLN | 1.1 |
| MSLN-CDH3 T-cell engager molecule 2 on HCT 116 wt | 0.0261 |
| MSLN-CDH3 T-cell engager molecule 2 on HCT 116 KO CDH3 | 29.2 |
| MSLN-CDH3 T-cell engager molecule 2 on HCT 116 KO MSLN | 3.5 |
| MSLN-CDH3 T-cell engager molecule 3 on HCT 116 wt | 0.0060 |
| MSLN-CDH3 T-cell engager molecule 3 on HCT 116 KO CDH3 | 44.5 |
| MSLN-CDH3 T-cell engager molecule 3 on HCT 116 KO MSLN | 1.0 |
| MSLN-CDH3 T-cell engager molecule 4 on HCT 116 wt | 0.0481 |
| MSLN-CDH3 T-cell engager molecule 4 on HCT 116 KO CDH3 | 37.8 |
| MSLN-CDH3 T-cell engager molecule 4 on HCT 116 KO MSLN | 24.4 |
| MSLN-CDH3 T-cell engager molecule 5 on HCT 116 wt | 0.0283 |
| MSLN-CDH3 T-cell engager molecule 5 on HCT 116 KO CDH3 | 22.6 |
| MSLN-CDH3 T-cell engager molecule 5 on HCT 116 KO MSLN | 8.5 |
| MSLN-CDH3 T-cell engager molecule 6 on HCT 116 wt | 0.0713 |
| MSLN-CDH3 T-cell engager molecule 6 on HCT 116 KO CDH3 | 51.8 |
| MSLN-CDH3 T-cell engager molecule 6 on HCT 116 KO MSLN | 8.7 |
| MSLN-CDH3 T-cell engager molecule 7 on HCT 116 wt | 0.0002 |
| MSLN-CDH3 T-cell engager molecule 7 on HCT 116 KO CDH3 | 0.69 |
| MSLN-CDH3 T-cell engager molecule 7 on HCT 116 KO MSLN | 0.20 |
| MSLN-CDH3 T-cell engager molecule 8 on HCT 116 wt | 0.0007 |
| MSLN-CDH3 T-cell engager molecule 8 on HCT 116 KO CDH3 | 1.1 |
| MSLN-CDH3 T-cell engager molecule 8 on HCT 116 KO MSLN | 0.24 |
| MSLN-CDH3 T-cell engager molecule 9 on HCT 116 wt | 0.0166 |
| MSLN-CDH3 T-cell engager molecule 9 on HCT 116 KO CDH3 | 4.4 |
| MSLN-CDH3 T-cell engager molecule 9 on HCT 116 KO MSLN | 4.1 |
| MSLN T-cell engager molecule on HCT 116 wt | 0.3 |
| MSLN T-cell engager molecule on HCT 116 KO CDH3 | 0.69 |
| MSLN T-cell engager molecule on HCT 116 KO MSLN | 98.9 |
| CDH3 T-cell engager molecule on HCT 116 wt | 1.6 |
| CDH3 T-cell engager molecule on HCT 116 KO CDH3 | 2055 |
| CDH3 T-cell engager molecule on HCT 116 KO MSLN | 1.4 |
| EGFRvIII T-cell engager molecule on HCT 116 wt | 8016 |
| EGFRvIII T-cell engager molecule on HCT 116 KO CDH3 | 7127 |
| EGFRvIII T-cell engager molecule on HCT 116 KO MSLN | 11184 |

MSLN-CDH3 T-cell engager molecule 1: MS 15-B12 CC × I2L × G4 × scFc × G4 × CH3 15-E11 CC × I2L
MSLN-CDH3 T-cell engager molecule 2: MS 15-B12 CC × I2L × (G4Q)3 × scFc × (G4Q)3 × CH3 15-E11 CC × I2L
MSLN-CDH3 T-cell engager molecule 3: MS 15-B12 CC × I2L × G4 × scFc × G4 × CH3 15-E11 CC × I2L_GQ
MSLN-CDH3 T-cell engager molecule 4: CH3 15-E11 CC × I2L × (G4S)3 × scFc × (G4S)3 × MS 15-B12 CC × I2L
MSLN-CDH3 T-cell engager molecule 5: CH3 15-E11 CC × I2L × (G4Q)3 × scFc × (G4Q)3 × MS 15-B12 CC × I2L
MSLN-CDH3 T-cell engager molecule 6: CH3 15-E11 CC × I2L × G4 × scFc × G4 × MS 15-B12 CC × I2L_GQ
MSLN-CDH3 T-cell engager molecule 7: MS 15-B12 CC × I2M2 × (G4S)3 × scFc × (G4S)3 × CH3 15-E11 CC × I2M2
MSLN-CDH3 T-cell engager molecule 8: CH3 15-E11 CC × I2M2 × (G4S)3 × scFc × (G4S)3 × MS 15-B12 CC × I2M2
MSLN-CDH3 T-cell engager molecule 9: MS 15-B12 CC × I2M2 × G4 × scFc × G4 × CH3 005-D5 CC × I2M2
MSLN T-cell engager molecule (MSLN only binding): MS 5-F11 × I2C0 × scFc
CDH3 T-cell engager molecule (CDH3 only binding): CH3 G8A 6-B12 × I2C0 × scFc
EGFRvIII T-cell engager molecule (non-binding): EGFRvIII CC × I2C0 × scFc

### Results:

TABLE 7
EC50 values in pM and gaps of naïve
HCT 116 cells versus knock-out HCT 116 cells

| | EC50 HCT | | EC50 HCT | | EC50 HCT |
|---|---|---|---|---|---|
| | 116 KO | fold | 116 wt | fold | 116 KO |
| | MSLN [pM] | gap | [pM] | gap | CDH3 [pM] |
| MSLN-CDH3 T-cell | 1.1 | 145 | 0.0076 | 2408 | 18.3 |
| engager molecule 1 | | | | | |
| MSLN-CDH3 T-cell | 3.5 | 134 | 0.0261 | 1119 | 29.2 |
| engager molecule 2 | | | | | |
| MSLN-CDH3 T-cell | 1.0 | 167 | 0.006 | 7417 | 44.5 |
| engager molecule 3 | | | | | |
| MSLN-CDH3 T-cell | 24.4 | 507 | 0.0481 | 786 | 37.8 |
| engager molecule 4 | | | | | |
| MSLN-CDH3 T-cell | 8.5 | 300 | 0.0283 | 799 | 22.6 |
| engager molecule 5 | | | | | |
| MSLN-CDH3 T-cell | 8.7 | 122 | 0.0713 | 727 | 51.8 |
| engager molecule 6 | | | | | |
| MSLN-CDH3 T-cell | 0.02 | 100 | 0.0002 | 3450 | 0.69 |
| engager molecule 7 | | | | | |
| MSLN-CDH3 T-cell | 0.2 | 286 | 0.0007 | 1571 | 1.1 |
| engager molecule 8 | | | | | |
| MSLN-CDH3 T-cell | 4.1 | 247 | 0.0166 | 265 | 4.4 |
| engager molecule 9 | | | | | |
| MSLN T-cell | 98.9 | 330 | 0.3 | 2 | 0.69 |
| engager molecule | | | | | |
| CDH3 T-cell | 1.4 | 1 | 1.6 | 1289 | 2055 |
| engager molecule | | | | | |
| EGFRvIII T-cell | 11184 | n/a | 8016 | n/a | 7127 |
| engager molecule | | | | | |

The tested MSLN-CDH3 T-cell engager molecules 1-9 showed increased activity (lower EC50 values) on MSLN and CDH3 double positive HCT 116 wt cells compared to respective HCT 116 k.o cells (HCT 116 CDH3 k.o and HCT 116 MSLN k.o.). The MSLN-CDH3 T-cell engager molecules 1-9 showed EC50 gaps greater 100-fold on MSLN and CDH3 double positive HCT 116 wt cells versus the respective HCT 116 k.o cells (HCT 116 CDH3 k.o and HCT 116 MSLN k.o.) (Fig. B) and Table 7).

TABLE 8
Overview on the efficacy of molecule 6 using the following cell lines:
Effector cells: human unstimulated T cells
Target cells: GSU wt, GSU KO CDH3, GSU KO MSLN
Test molecule: MSLN-CDH3 T-cell engager molecule 6

| | EC50 [pM] |
|---|---|
| E:T ratio 10:1 on GSU wt | 0.6 |
| E:T ratio 10:1 on GSU KO CDH3 | 39.6 |
| E:T ratio 10:1 on GSU KO MSLN | 98.0 |
| E:T ratio 1:1 on GSU wt | 0.8 |
| E:T ratio 1:1 on GSU KO CDH3 | 108 |
| E:T ratio 1:1 on GSU KO MSLN | 322 |
| E:T ratio 1:2 on GSU wt | 1.0 |
| E:T ratio 1:2 on GSU KO CDH3 | 446 |
| E:T ratio 1:2 on GSU KO MSLN | 341 |

Legend:
MSLN-CDH3 T-cell engager molecule 6: CH3 15-E11 CC × I2L × G4 × scFc × G4 × MS 15-B12 CC × I2L_GQ

### Results:

TABLE 9
MSLN-CDH3 T-cell engager molecule 6 EC50 values
and gaps of naïve GSU cells versus GSU knock-out
cells using different effector:target ratios

| | EC50 | | EC50 | | EC50 |
|---|---|---|---|---|---|
| | GSU KO | fold | GSU | fold | GSU KO |
| E:T Ratio | MSLN [pM] | gap | wt [pM] | gap | CDH3 [pM] |
| 10:1 | 98.0 | 163 | 0.6 | 66 | 39.5 |
| 1:1 | 322 | 403 | 0.8 | 135 | 108 |
| 1:2 | 341 | 341 | 1.0 | 446 | 446 |

[0569] The MSLN-CDH3 T-cell engager molecule 6 showed EC50 gaps greater 100-fold on MSLN and CDH3 double positive GSU wt cells versus the respective GSU k.o cells (GSU CDH3 k.o and GSU MSLN k.o.) at different E:T ratios of 10:1, 1:2 and 1:1. At lower E:T ratios such as 1:2 and 1:1 greater EC50 gaps were achieved compared to the gaps observed at a higher E:T ratio of 10:1 (FIG. C) and Table 9).

### Example 2: Selectivity Gap of Multitargeting Antigen-Binding Molecules of the Invention

[0570] FACS-Based Cytotoxicity Assay with Unstimulated Human PBMC

### Isolation of Effector Cells

[0571] Human peripheral blood mononuclear cells (PBMC) were prepared by Ficoll density gradient centrifugation from enriched lymphocyte preparations (buffy coats), a side product of blood banks collecting blood for transfusions. Buffy coats were supplied by a local blood bank and PBMC were prepared on the day after blood collection. After Ficoll density centrifugation and extensive washes with Dulbecco's PBS (Gibco), remaining erythrocytes were removed from PBMC via incubation with erythrocyte lysis buffer (155 mM NH4Cl, 10 mM KHCO3, 100 μM EDTA). Remaining lymphocytes mainly encompass B and T lymphocytes, NK cells and monocytes. PBMC were kept in culture at 37° C./5% CO2 in RPMI medium (Gibco) with 10% FBS (Bio West, #S1810).

### Isolation of Human T-Cells

[0572] For isolation of human T-cells, Pan T Cell Isolation Kit, human (Miltenyi Biotec, MACS, #130-096-535) was used to deplete non-target cells, i.e., monocytes, neutrophils, eosinophils, B cells, stem cells, dendritic cells, NK cells, granulocytes, or erythroid cells from the PBMC cell solution. Therefore, respective number of PBMC was centrifuged for 10 min at room temperature at 300×g. Supernatant was discarded, and the cell pellet was resuspended in MACS isolation buffer (Dulbecco's PBS (Gibco), 100 μM EDTA, 0.5% FBS (Bio West. #S1810)) [40 μl buffer/1×107 cells]. Pan T Cell Biotin-Antibody cocktail [10 μL/1×107 cells] was added and suspension was incubated for 5 min at 4° C. Afterwards, MACS isolation buffer was added [30 μl buffer/1×107 cells] together with Anti-Biotin MicroBeads [20 μl/1×107 cells)] and cell suspension was left at 4° C. for 10 min. The cell solution was then applied to LS Columns (Miltenyi Biotec, #130-042-401) in the magnetic field of a suitable Miltenyi Separator to isolate untouched T cells while magnetically labelled non-T-cells remain on the column. Columns were washed 3 times with MACS isolation buffer. Column flowthrough was centrifuged (see above), supernatant was discarded and cells were resuspended in RPMI complete medium i.e. RPMI1640 (Biochrom AG, #FG1215) supplemented with 10% FBS (Bio West, #S1810), 1× non-essential amino acids (Biochrom AG, #K0293), 1 mM sodium pyruvate (Biochrom AG, #L0473) and 100 U/mL penicillin/streptomycin (Biochrom AG, #A2213) and incubated at 37° C. until needed.

### Target Cell Labeling for Flow-Cytometry Based T-Cell-Dependent Cellular Cytotoxicity (TDCC) Assay

[0573] For the analysis of cell lysis in flow cytometry assays, the fluorescent membrane dye DiOC18 (DiO) (Thermo Fisher, #V22886) was used to label human-target transfected CHO cells or cancer cell lines as target cells and distinguish them from effector cells. Briefly, cells were harvested, washed once with PBS and adjusted to 106 cell/mL in PBS containing the membrane dye DiO (5 μL/106 cells). After incubation for 3 min at 37° C., cells were washed twice in complete RPMI medium and directly used in assay.

### Setup of Flow Cytometry-Based T-Cell-Dependent Cellular Cytotoxicity (TDCC) Assay and Analysis

[0574] Cytotoxic activity of bispecific T-cell engager molecules was determined through the capability of inducing T-cell mediated target cell lysis. Therefore, the lysis of human target cells in the presence of serial dilutions of bispecific T-cell engager molecules and effector cells was analyzed.

[0575] DiO-labeled target-cells and effector cells (i.e., Pan T-cells) were mixed at an effector to target-cell (E:T) ratio of 10:1 and incubated with serial dilutions of the corresponding bispecific T-cell engager molecule in 96-well plates. Plates were incubated at 37° C., 5% CO2 and 95% relative humidity for 48 h. On day of assay analysis, cells were transferred to a new 96-well plate and loss of target cell membrane integrity was monitored by adding propidium iodide (PI) at a final concentration of 1 μg/mL. PI is a membrane impermeable dye that normally is excluded from viable cells, whereas dead cells take it up and become identifiable by fluorescent emission.

[0576] Samples were measured by flow cytometry on an iQue Plus (Intellicyt, now Sartorius) instrument and analyzed by Forecyt software (Intellicyt). Target cells were identified as DiO-positive cells. PI-negative target cells were classified as living target cells. Percentage of specific cell lysis respective cytotoxicity was calculated according to the following formula:

$$Cytoxicity [ \% ] = ( \frac{{n}_{dead target cells}}{{n}_{target cells}} ) \times 100$$

[0577] n=number of events per well

[0578] In some experiments, the cytotoxicity was calculated according to this formula:

$$Cytotoxicity [ \% ] = ( 1 - \frac{{\%}_{viable target cells molecule ‐ treated}}{{\%}_{viable target cells untreated}} ) \times 100$$

[0579] n=number of events per well

[0580] Using GraphPad Prism 7.04 software (Graph Pad Software, San Diego), the percentage of cytotoxicity was plotted against the corresponding bispecific T-cell engager molecule concentrations. Sigmoidal dose response curves were analyzed with the four parametric logistic regression models with variable slope and EC50 values were calculated.

[0581] The following target cell lines were used for the FACS-based cytotoxicity assay:

CHO huMSLN:

[0582] Parental CHO (DHFR−) cells transfected with human MSLN on pEFDHFR-MTX1 for expression of human MSLN and dummy sequence on pEFDHFR-MTX2

CHO huEpCAM:

[0583] Parental CHO (DHFR−) cells transfected with human EpCAM on pEFDHFR-MTX2 for expression of human EpCAM and dummy sequence on pEFDHFR-MTX1

CHO huMSLN huEpCAM:

[0584] Parental CHO (DHFR−) cells transfected with human MSLN on pEFDHFR-MTX1 and human EpCAM on pEFDHFR-MTX2 for simultaneous expression of human MSLN and human EpCAM

CHO huCLL1:

[0585] Parental CHO (DHFR−) cells transfected with human CLL1 on pEFDHFR for expression of human CLL1

CHO huFLT3:

[0586] Parental CHO (DHFR−) cells transfected with human FLT3 on pEFDHFR for expression of human FLT3

CHO huCLL1 huFLT3:

[0587] Parental CHO (DHFR−) cells transfected with human CLL1 on pEFDHFR-MTX1 and human FLT3 on pEFDHFR-MTX2 for simultaneous expression of human CLL1 and human FLT3

### SW48 WT:

[0588] Parental cell line, wildtype (WT)

### SW48 MSLN KO:

[0589] Parental cell line SW48, in which MSLN gene was knocked out (KO)

### SW48 CDH3 KO:

[0590] Parental cell line SW48, in which CDH3 gene was knocked out (KO)

### Cytokine Measurement of In Vitro TDCC Assay

[0591] Cytokine release during TDCC in-vitro assay was measured with BD™ Cytometric Bead Array Human Th1/Th2 Cytokine Kit II (BD Biosciences, #551809). Therefore, two cytotoxicity assay sets were set up with full PBMC as effector cells. After 24 h, the supernatant of one assay plate set was removed and analyzed for the levels of human cytokines IL-2, IL-4, IL-6, IL-10, TNFα und IFNγ according to the manufacturer's protocol. After 48 h, the cytotoxic activity of the other assay set was measured.

### Setup of Luciferase-Based T-Cell-Dependent Cellular Cytotoxicity (TDCC) Assay and Analysis

[0592] Luc-positive target-cells and effector cells (i.e., Pan T-cells) were mixed at an effector to target-cell (E:T) ratio of 10:1 and incubated with serial dilutions of the corresponding bispecific T-cell engager molecule in 384-well plates. The multitargeting antibody-mediated cytotoxic reaction proceeded for 48 hours in a 5% CO2 humidified incubator. Then 25 L substrate (Steady-Glo® Reagent, Promega) were transferred to the 384-well plate. Only living, luciferase-positive cells react to the substrate and thus create a luminescence signal. Samples were measured with a SPARK microplate reader (TECAN) and analyzed by Spark Control Magellan software (TECAN).

[0593] Percentage of cytotoxicity was calculated as follows:

$$Cytoxicity [ \% ] = ( 1 - \frac{{RLU}_{Sample}}{{RLU}_{Negative Control}} ) \times 100$$

[0594] RLU=relative light units

[0595] Negative-Control=cells without multi-specific antigen-binding molecule

[0596] Using GraphPad Prism 7.04 software (Graph Pad Software, San Diego), the percentage of cytotoxicity was plotted against the corresponding bispecific T-cell engager molecule concentrations. Sigmoidal dose response curves were analyzed with the four parametric logistic regression models with variable slope and EC50 values were calculated. Following target cell lines were used for the Luciferase-based cytotoxicity assay:

### HCT 116 LUC WT:

[0597] Parental cell line, wildtype (WT), transfected with luciferase

### HCT 116 LUC MSLN KO:

[0598] Parental cell line HCT 116 LUC, in which MSLN gene was knocked out (KO)

### HCT 116 LUC CDH3 KO:

[0599] Parental cell line HCT 116 LUC, in which CDH3 gene was knocked out (KO)

TABLE 10
EC50 values of mono versus dual targeting molecules on double
positive CHO cells versus single positive CHO cells;

| | | EC50 |
|---|---|---|
| | | [pM] |
| CLL1-FLT3 T-cell engager molecule 1 on | CHO huCLL1 | b.c.t |
| CLL1-FLT3 T-cell engager molecule 1 on | CHO huFLT3 | b.c.t |
| CLL1-FLT3 T-cell engager molecule 1 on | CHO huCLL1 huFLT3 | 1.9 |
| FLT3 T-cell engager molecule on | CHO huCLL1 | b.c.t. |
| FLT3 T-cell engager molecule on | CHO huFLT3 | 149 |
| FLT3 T-cell engager molecule on | CHO huCLL1 huFLT3 | 57 |
| CLL1 T-cell engager molecule on | CHO huCLL1 | 76 |
| CLL1 T-cell engager molecule on | CHO huFLT3 | b.c.t. |
| CLL1 T-cell engager molecule on | CHO huCLL1 huFLT3 | 36 |

b.c.t: below calculation threshold

[0600] FIG. 2 shows cytotoxicity curves and EC50 values of CLL1-FLT3 T-cell engager molecules and mono targeting control T-cell engager molecules on double positive CHO huCLL1 huFLT3 target cells and single positive CHO huCLL1 or CHO huFLT3 target cells. Effector cells were unstimulated Pan T-cells. b.c.t: below calculation threshold

TABLE 11
EC50 values and selectivity gaps of double positive
CHO cells versus single positive CHO cells;

| | CHO | Gap double | CHO | Gap double | CHO |
|---|---|---|---|---|---|
| | huCLL1 | positive | huCLL1 | positive | huFLT3 |
| | EC50 | to single | huFLT3 | to single | EC50 |
| | [pM] | positive | EC50 [pM] | positive | [pM] |
| CLL1-FLT3 T-cell | b.c.t | >1000 | 1.9 | >1000 | b.c.t |
| engager molecule 1 | | | | | |
| CLL1 T-cell | 76 | 2 | 35.6 | — | b.c.t |
| engager molecule 1 | | | | | |
| FLT3 T-cell | b.c.t | — | 56.9 | 3 | 149 |
| engager molecule 1 | | | | | |

Legend

| | |
|---|---|
| CLL1-FLT3 T-cell | CL1 9-G4 CC × I2C cc × scFc × FL 4-E9 |
| engager molecule 1 | CC × I2C cc |
| CLL1 T-cell | CL1 9-G4 CC × PSMA 76B10 × I2C0 × |
| engager molecule 1 | scFc |
| FLT3 T-cell | PSMA 76-B10 × FL 4-E9 CC × I2C0 × scFc |
| engager molecule 1 | |

b.c.t: below calculation threshold

[0601] Results: CLL-FLT3 T-cell engager molecule 1 showed an increased activity (lower EC50 value) on huCLL1 and huFLT3 double positive target cells compared to huCLL1 or huFLT3 single positive target cells. This molecule showed EC50 selectivity gaps greater 1000-fold on double positive target cells versus single positive target cells. CLL-FLT3 T-cell engager molecule 1 contains two I2C binding domains with a disulfide bridge facilitated by two cysteine substitutions in the scFv framework at position 44 and 100 after Kabat numbering (further called I2C cc 44/100 or I2C cc). Mono targeting control T-cell engager molecules had comparable activity on single positive vs. double positive cells (difference only 2-3 fold).

### Example 3: Selectivity Gap of Different Multitargeting Bispecific T-Cell Engager Polypeptide (MBiTEP) Formats

[0602] FIG. 3: Cytotoxicity curves of EpCAM MSLN T-cell engager molecules and mono targeting control T-cell engager molecules on double positive CHO huEpCAM huMSLN target cells and single positive CHO huEpCAM or CHO huMSLN target cells. Effector cells were unstimulated Pan T-cells.

TABLE 12
EC50 values and selectivity gaps of double positive
CHO cells versus single positive CHO cells;

| | | Gap | | Gap | |
|---|---|---|---|---|---|
| | | double | CHO | double | CHO |
| | CHO | positive to | huEpCAM | positive to | huMSLN |
| | huEpCAM | single | huMSLN | single | EC50 |
| | EC50 [pM] | positive | EC50 [pM] | positive | [pM] |
| EpCAM-MSLN T-cell | 15 | 11 | 1.4 | 2 | 2.7 |
| engager molecule 1 | | | | | |
| EpCAM-MSLN T-cell | 19 | 15 | 1.3 | 10 | 13 |
| engager molecule 2 | | | | | |
| EpCAM-MSLN T-cell | 6.4 | 7 | 0.9 | 17 | 16 |
| engager molecule 3 | | | | | |
| EpCAM-MSLN T-cell | 23 | 10 | 2.3 | 10 | 22 |
| engager molecule 4 | | | | | |
| EpCAM-MSLN T-cell | 14 | 176 | 0.1 | 151 | 12 |
| engager molecule 5 | | | | | |
| EpCAM-MSLN T-cell | 135 | 155 | 0.9 | 511 | 445 |
| engager molecule 6 | | | | | |
| MSLN T-cell | 5.7 | 2 | 3.5 | — | b.c.t. |
| engager molecule 1 | | | | | |
| EpCAM T-cell | b.c.t. | — | 2.8 | 1 | 4.1 |
| engager molecule 1 | | | | | |

Legend

| | |
|---|---|
| EpCAM-MSLN T-cell | EpCAM 5-10 × H2 × scFc × I2Ccc × |
| engager molecule 1 | I2Ccc |
| EpCAM-MSLN T-cell | EpCAM 5-10 × H2 × I2Ccc × I2Ccc × |
| engager molecule 2 | scFc |
| EpCAM-MSLN T-cell | EpCAM 5-10 × H2 × I2Ccc × scFc × |
| engager molecule 3 | I2Ccc |
| EpCAM-MSLN T-cell | EpCAM 5-10 × scFc × H2 × I2Ccc × |
| engager molecule 4 | I2Ccc |
| EpCAM-MSLN T-cell | EpCAM 5-10 × I2Ccc × scFc × I2Ccc × |
| engager molecule 5 | H2 |
| EpCAM-MSLN T-cell | EpCAM 5-10 × I2Ccc × scFc × H2 × |
| engager molecule 6 | I2Ccc0 |
| EpCAM T-cell | EpCAM 5-10 × I2C × scFc |
| engager molecule 1 | |
| MSLN T-cell | MSLN 5F11 × I2C × scFc |
| engager molecule 1 | |

b.c.t: below calculation threshold

[0603] Results: From the tested EpCAM MSLN T-cell engager molecule 1-6, EpCAM MSLN T-cell engager molecule 5 and 6 show a selectivity gap between double positive and single positive target cells >100-fold. EpCAM MSLN T-cell engager molecule 5 and 6 have one bispecific entity (target binding domain and CD3 binding domain) at the N-terminus and one bispecific entity at the C-terminus, separated by a single chain Fc domain [target binding domain×CD3 binding domain×scFc×CD3 binding domain×target binding domain in EpCAM MSLN T-cell engager molecule 5 respectively target binding domain×CD3 binding domain×scFc×target binding domain×CD3 binding domain in EpCAM MSLN T-cell engager molecule 6]. Mono targeting control T-cell engager molecules had comparable activity on single positive vs. double positive cells (difference only 1-2 fold).

### Example 4 Selectivity Gap of Multitargeting Bispecific T-Cell Engager Polypeptides with Different Linker Between Target Binding Domain and CD3 Binding Domain

[0604] FIG. 4A: Cytotoxicity curves of EpCAM MSLN T-cell engager molecules on double positive CHO huEpCAM huMSLN target cells and single positive CHO huEpCAM or CHO huMSLN target cells. Effector cells were unstimulated Pan T-cells.

TABLE 13
EC50 values and selectivity gaps of double positive
CHO cells versus single positive CHO cells

| | CHO | Gap double | CHO | Gap double | CHO |
|---|---|---|---|---|---|
| | huEpCAM | positive to | huEpCAM | positive to | huMSLN |
| | EC50 | single | huMSLN | single | EC50 |
| | [pM] | positive | EC50 [pM] | positive | [pM] |
| EpCAM-MSLN T-cell | 93 | 105 | 0.9 | 183 | 162 |
| engager molecule 1 | | | | | |
| EpCAM-MSLN T-cell | 446 | 541 | 0.8 | 175 | 145 |
| engager molecule 2 | | | | | |

Legend

| | |
|---|---|
| EpCAM-MSLN T-cell | EpCAM 5-10 × I2Ccc -scFc × I2Ccc × H2 |
| engager molecule 1 | |
| EpCAM-MSLN T-cell | EpCAM 5-10 × (G₄S)₁₀ × I2Ccc × scFc × |
| engager molecule 2 | I2Ccc × (G₄S)₁₀ × MSLN H2 |

[0605] Results: EpCAM-MSLN T-cell engager molecule 1 and 2 showed comparable activity on double positive CHO huEpCAM and huMSLN target cells. These molecules showed an increased activity (lower EC50 value) on double positive target cells compared to CHO huEpCAM or CHO huMSLN single positive target cells. EpCAM-MSLN T-cell engager 1 and 2 contain the same target binding and CD3 binding domains in the same orientation [target binding domain×CD3 binding domain×scFc×CD3 binding domain×target binding domain], but they differ in the linker sequences between target binding and CD3 binding domain. With both linker variants, the EC50 selectivity gap between double positive target cells versus single positive target is greater than 100-fold.

[0606] FIG. 4B: Cytotoxicity curves of EpCAM MSLN T-cell engager molecules on double positive CHO huEpCAM huMSLN target cells and single positive CHO huEpCAM or CHO huMSLN target cells. Effector cells were unstimulated Pan T-cells.

TABLE 14
EC50 values and selectivity gaps of double positive
CHO cells versus single positive CHO cells;

| | CHO | Gap double | CHO | Gap double | CHO |
|---|---|---|---|---|---|
| | huEpCAM | positive | huEpCAM | positive | huMSLN |
| | EC50 | to single | huMSLN | to single | EC50 |
| | [pM] | positive | EC50 [pM] | positive | [pM] |
| EpCAM-MSLN T-cell | 40 | 206 | 0.19 | 794 | 154 |
| engager molecule 1 | | | | | |
| EpCAM-MSLN T-cell | 978 | 1903 | 0.51 | >1000 | b.c.t. |
| engager molecule 2 | | | | | |
| EpCAM-MSLN T-cell | 34 | 148 | 0.23 | 383 | 89 |
| engager molecule 3 | | | | | |
| EpCAM-MSLN T-cell | 21 | 104 | 0.20 | 226 | 46 |
| engager molecule 4 | | | | | |

Legend

| | |
|---|---|
| EpCAM-MSLN T-cell | EpCAM 5-10 × I2Ccc × scFc × H2 × I2Ccc0 |
| engager molecule 1 | |
| EpCAM-MSLN T-cell | EpCAM 5-10 × (EAAAK)₁₀ × I2Ccc × scFc × |
| engager molecule 2 | MSLN H2 × (EAAAK)₁₀ × I2Ccc |
| EpCAM-MSLN T-cell | EpCAM 5-10 × (G₄S)₁₀ × I2Ccc × scFc × MSLN |
| engager molecule 3 | H2 × (G₄S)₁₀ × I2Ccc |
| EpCAM-MSLN T-cell | EpCAM 5-10 × G₄S × I2Ccc × scFc × MSLN |
| engager molecule 4 | H2 × G₄S × I2Ccc |

b.c.t: below calculation threshold

[0607] Results: EpCAM-MSLN T-cell engager molecule 1, 2, 3 and 4 showed an increased activity (lower EC50 value) on CHO huEpCAM and huMSLN double positive target cells compared to CHO huEpCAM or CHO huMSLN single positive target cells. EpCAM-MSLN T-cell engager molecule 1, 2 and 3 contain the same target binding and CD3 binding domains in the same orientation [target binding domain×CD3 binding domain×scFc×target binding domain×CD3 binding domain], but they differ in the linker sequences between target binding and CD3 binding domain. Despite these differences in the linker length and sequence, the shown EpCAM-MSLN T-cell engager molecule 1, 2, 3 and 4 show an EC50 selectivity gap between double positive target cells versus single positive target greater than 100-fold.

[0608] FIG. 4C: Cytotoxicity curves of CLL1-FLT3 T-cell engager molecules on double positive CHO huCLL1 huFLT3 target cells and single positive CHO huCLL1 or CHO huFLT3 target cells. Effector cells were unstimulated Pan T-cells.

TABLE 15
EC50 values and selectivity gaps of double positive
CHO cells versus single positive CHO cells;

| | CHO | Gap double | CHO | Gap double | CHO |
|---|---|---|---|---|---|
| | huCLL1 | positive | huCLL1 | positive | huFLT3 |
| | EC50 | to single | huFLT3 | to single | EC50 |
| | [pM] | positive | EC50 [pM] | positive | [pM] |
| CLL1-FLT3 T-cell | 130 | 94 | 1.39 | >1000 | b.c.t. |
| engager molecule 1 | | | | | |
| CLL1-FLT3 T-cell | 391 | 98 | 4.00 | >1000 | b.c.t. |
| engager molecule 2 | | | | | |
| CLL1-FLT3 T-cell | 67 | 70 | 0.95 | >1000 | b.c.t. |
| engager molecule 3 | | | | | |
| CLL1-FLT3 T-cell | 177 | 285 | 0.62 | >1000 | b.c.t. |
| engager molecule 4 | | | | | |

Legend

| | |
|---|---|
| CLL1-FLT3 T-cell | CL1 9-G4 CC × I2Ccc × scFc × FL 4-E9 |
| engager molecule 1 | CC × I2Ccc |
| CLL1-FLT3 T-cell | CL1 9-G4 CC × (EAAAK)₁₀ × I2Ccc × G₄ × |
| engager molecule 2 | scFc × G₄ × FL 4-E9 CC × (EAAAK)₁₀ × |
| | I2Ccc |
| CLL1-FLT3 T-cell | CL1 9-G4 CC × G₄S × I2Ccc × G₄ × scFc × |
| engager molecule 3 | G₄ × FL 4-E9 CC × G₄S × I2Ccc |
| CLL1-FLT3 T-cell | CL1 9-G4 CC × (G₄S)₃ × I2Ccc × G₄ × scFc × |
| engager molecule 4 | G₄ × FL 4-E9 CC × (G₄S)₃ × I2Ccc |

b.c.t: below calculation threshold

[0609] Results: CLL1-FLT3 T-cell engager molecule 1, 2, 3 and 4 showed an increased activity (lower EC50 value) on CHO huCLL1 and huFLT3 double positive target cells compared to CHO huCLL1 or CHO huFLT3 single positive target cells. CLL1-FLT3 T-cell engager molecule 1, 2, 3 and 4 contain the same target binding and CD3 binding domains in the same orientation [target binding domain×CD3 binding domain×scFc×target binding domain×CD3 binding domain], but differ in the linker sequences between target binding and CD3 binding domain. Despite these differences, the EC50 selectivity gap between double positive target cells versus single positive target cells is comparable for all molecules.

### Example 5: Selectivity Gap of Multitargeting Bispecific T-Cell Engager Polypeptides (MBiTEP) with Different Domains Separating the Two Bispecific Entities

[0610] FIG. 5: Cytotoxicity curves of EpCAM MSLN T-cell engager molecules on double positive CHO huEpCAM huMSLN target cells and single positive CHO huEpCAM or CHO huMSLN target cells. Effector cells were unstimulated Pan T-cells.

TABLE 16
Characteristics of structure used between bispecific entities

| | Amino acids | Calculated kDa | Modeled |
|---|---|---|---|
| | between | between | distance between |
| | bispecific | bispecific | bispecific |
| | entities | entities | entities [A] |
| EpCAM-MSLN T-cell | 514 | 54.7 | 130 (rigid) |
| engager molecule 1 | | | |
| EpCAM-MSLN T-cell | 153 | 16.6 | 60-80 (rigid) |
| engager molecule 2 | | | |
| EpCAM-MSLN T-cell | 50 | 3.2 | 30-150 (flexible) |
| engager molecule 3 | | | |
| EpCAM-MSLN T-cell | 5 | 0.3 | 35-40 (flexible) |
| engager molecule 4 | | | |

TABLE 17
EC50 values and selectivity gaps of double positive
CHO cells versus single positive CHO cells;

| | CHO | Gap double | CHO | Gap double | CHO |
|---|---|---|---|---|---|
| | huEpCAM | positive to | huEpCAM | positive to | huMSLN |
| | EC50 [pM] | single | huMSLN | single | EC50 [pM] |
| | | positive | EC50 [pM] | positive | |
| EpCAM-MSLN T-cell | b.c.t. | >1000 | 0.5 | >1000 | b.c.t. |
| engager molecule 1 | | | | | |
| EpCAM-MSLN T-cell | 913 | 155 | 1.7 | 531 | 90 |
| engager molecule 2 | | | | | |
| EpCAM-MSLN T-cell | 14.6 | 7.7 | 0.7 | 20 | 11 |
| engager molecule 3 | | | | | |
| EpCAM-MSLN T-cell | 8.1 | 6.1 | 0.5 | 17 | 13 |
| engager molecule 4 | | | | | |

Legend

| | |
|---|---|
| EpCAM-MSLN T-cell | pCAM 5-10 × I2Ccc × scFc × H2 × I2Ccc0 |
| engager molecule 1 | |
| EpCAM-MSLN T-cell | EpCAM 5-10 × I2Ccc44/100 × G4S × PD1 × G4S × |
| engager molecule 2 | H2 × I2C6cc44/100 |
| EpCAM-MSLN T-cell | EpCAM 5-10 × I2Ccc44/100 × (G4S)10 × H2 × |
| engager molecule 3 | I2C6cc44/100 |
| EpCAM-MSLN T-cell | EpCAM 5-10 × I2Ccc44/100 × H2 × I2C6cc44/100 |
| engager molecule 4 | |

b.c.t: below calculation threshold

[0611] Results: The highest selectivity gap between double positive and single positive target cells was achieved by EpCAM-MSLN T-cell engager molecules 1 and 2. In these molecules the bispecific entities were separated by either more than 50 amino acids, OR by an arbitrarily structure with more than 3.2 kDa, OR by an arbitrarily structure that results in a calculated distance/space of at least 40 Å.

### Example 6: Selectivity Gap of Multitargeting Antigen-Binding Molecules of the Invention with Different CD3 Affinities/Activities (Low Vs. High

[0612] FIG. 6A shows cytotoxicity curves of CLL1-FLT3 T-cell engager molecules on double positive CHO huCLL1 huFLT3 target cells and single positive CHO huCLL1 or CHO huFLT3 target cells. Effector cells were unstimulated Pan T-cells.

TABLE 18
Activity reduction of CD3 binding domains used in CLL1-
FLT3 T-cell engager molecules compared to high affinity CD3
binding domain I2C with K_{D} of 1.2E−08M

| | Activity reduction of |
|---|---|
| | single CD3 binding domain |
| | in molecule compared to |
| | high affinity binding |
| | domain I2C with Kp 1.2E−08M |
| CLL1-FLT3 T-cell engager molecule 1 | Ca 100-fold |
| CLL1-FLT3 T-cell engager molecule 2 | Ca 100-fold |
| CLL1-FLT3 T-cell engager molecule 3 | Ca 92-fold |
| CLL1-FLT3 T-cell engager molecule 4 | Ca 98-fold |
| CLL1-FLT3 T-cell engager molecule 5 | Ca 145-fold |
| CLL1-FLT3 T-cell engager molecule 6 | Ca 6-fold |
| CLL1-FLT3 T-cell engager molecule 7 | Ca 9-fold |
| CLL1-FLT3 T-cell engager molecule 8 | Ca 6-fold |
| CLL1-FLT3 T-cell engager molecule 9 | I2C |

TABLE 19
EC50 values and selectivity gaps of double positive
CHO cells versus single positive CHO cells;

| | CHO | Gap double | CHO | Gap double | CHO |
|---|---|---|---|---|---|
| | huCLL1 | positive | huCLL1 | positive | huFLT3 |
| | EC50 | to single | huFLT3 | to single | EC50 |
| | [pM] | positive | EC50 [pM] | positive | [pM] |
| CLL1-FLT3 T-cell | b.c.t. | >1000 | 1.9 | >1000 | b.c.t. |
| engager molecule 1 | | | | | |
| CLL1-FLT3 T-cell | b.c.t. | >1000 | 5.4 | >1000 | b.c.t. |
| engager molecule 2 | | | | | |
| CLL1-FLT3 T-cell | b.c.t. | >1000 | 10.3 | >1000 | b.c.t. |
| engager molecule 3 | | | | | |
| CLL1-FLT3 T-cell | b.c.t. | >1000 | 6.3 | >1000 | b.c.t. |
| engager molecule 4 | | | | | |
| CLL1-FLT3 T-cell | b.c.t. | >1000 | 56.7 | >1000 | b.c.t. |
| engager molecule 5 | | | | | |
| CLL1-FLT3 T-cell | 89 | 49 | 1.8 | 94 | 170 |
| engager molecule 6 | | | | | |
| CLL1-FLT3 T-cell | 675 | 111 | 6.1 | 129 | 785 |
| engager molecule 7 | | | | | |
| CLL1-FLT3 T-cell | 261 | 41 | 6.4 | 67 | 428 |
| engager molecule 8 | | | | | |
| CLL1-FLT3 T-cell | 24 | 3 | 7.4 | 6 | 43 |
| engager molecule 9 | | | | | |

Legend

| | |
|---|---|
| CLL1-FLT3 T-cell | CL1 9-G4 CC × I2Ccc × scFc × FL 4-E9 |
| engager molecule 1 | CC × I2Ccc |
| CLL1-FLT3 T-cell | CL1 9-G4 CC × I2Ccc × G4 × scFc × |
| engager molecule 2 | G4 × FL 4-E9 CC × I2Ccc |
| CLL1-FLT3 T-cell | CL1 9-G4 CC × 5B1.09 × scFc × FL 4-E9 |
| engager molecule 3 | CC × 5B1.09 |
| CLL1-FLT3 T-cell | CL1 9-G4 CC × 6H10.09 × scFc × FL 4- |
| engager molecule 4 | E9 CC × 6H10.09 |
| CLL1-FLT3 T-cell | CL1 9-G4 CC × 5B1.05 × scFc × FL 4-E9 |
| engager molecule 5 | CC × 5B1.05 |
| CLL1-FLT3 T-cell | CL1 9-G4 CC × 4G10.04 × scFc × FL 4- |
| engager molecule 6 | E9 CC × 4G10.04 |
| CLL1-FLT3 T-cell | CL1 9-G4 CC × 6H10.03 × scFc × FL 4- |
| engager molecule 7 | E9 CC × 6H10.03 |
| CLL1-FLT3 T-cell | CL1 9-G4 CC × 4F10.03mut × scFc × FL |
| engager molecule 8 | 4-E9 CC × 4F10.03mut |
| CLL1-FLT3 T-cell | CL1 9-G4 CC × I2C × (G4S)3 × scFc × |
| engager molecule 9 | (G4S)3 × FL 4-E9 CC × I2C |

b.c.t: below calculation threshold

[0613] Results: CLL1-FLT3 T-cell engager molecule 1, 2, 3, 4 and 5 showed the highest selectivity gap between double positive CHO huCLL1 huFLT3 target cells and single positive CHO huCLL1 or huFLT3 target cells, which is over 1000-fold, compared to CLL1-FLT3 T-cell engager molecule 6, 7, 8 and 9. CLL1-FLT3 T-cell engager molecule 1, 2, 3, 4 and 5 contain two CD3-binding domains that are approximately 100-fold less active than the reference CD3 binding domain I2C with an K_{D} of 1.2E-08M. CLL1-FLT3 T-cell engager molecule 6, 7 and 8 contain two CD3-binding domains that are between 6-9-fold less active than I2C. CLL1-FLT3 T-cell engager molecule 9 contains CD3 binding domain I2C.

[0614] FIG. 6B shows cytotoxicity curves of EpCAM MSLN T-cell engager molecules on double positive CHO huEpCAM huMSLN target cells and single positive CHO huEpCAM or CHO huMSLN target cells. Effector cells were unstimulated Pan T-cells.

TABLE 20
EC50 values and selectivity gaps of double positive
CHO cells versus single positive CHO cells

| | CHO | Gap double | CHO | Gap double | CHO |
|---|---|---|---|---|---|
| | huEpCAM | positive to | huEpCAM | positive to | huMSLN |
| | EC50 [pM] | single | huMSLN | single | EC50 |
| | | positive | EC50 [pM] | positive | [pM] |
| EpCAM-MSLN T-cell | 151 | 203 | 0.7 | 352 | 263 |
| engager molecule 1 | | | | | |
| EpCAM-MSLN T-cell | 17 | 16 | 1.1 | 10 | 11 |

engager molecule 2

Legend

| | |
|---|---|
| EpCAM-MSLN T-cell | EpCAM 5-10 × I2Ccc × scFc × I2Ccc × H2 |
| engager molecule 1 | |
| EpCAM-MSLN T-cell | EpCAM 5-10 × I2C × scFc × I2C0 × H2 |
| engager molecule 2 | |

[0615] Results: EpCAM MSLN T-cell engager molecule 1 showed a higher EC50 selectivity gap between double positive and single positive target cells compared to EpCAM MSLN T-cell engager molecule 2 (203-fold vs 16 fold on CHO huEpCAM compared to double positive cells; and 352-fold vs 10-fold on CHO huMSLN compared to double positive cells). EpCAM-MSLN T-cell engager molecule 2 contains two high affinity CD3-binding domains (I2C, K_{D} of 1.2E-08M), EpCAM-MSLN T-cell engager molecule 1 contains two CD3-binding domains, that are approximately 100-fold less active than I2C.

[0616] FIG. 6C shows cytotoxicity curves of CLL1-FLT3 T-cell engager molecules on double positive CHO huCLL1 huFLT3 target cells and single positive CHO huCLL1 or CHO huFLT3 target cells. Effector cells were unstimulated Pan T-cells.

TABLE 21
EC50 values and selectivity gaps of double positive
CHO cells versus single positive CHO cells;

| | | | CHO | | |
|---|---|---|---|---|---|
| | CHO | Gap double | huCLL1 | Gap double | CHO |
| | huCLL1 | positive | huFLT3 | positive to | huFLT3 |
| | EC50 | to single | EC50 | single | EC50 |
| | [pM] | positive | [pM] | positive | [pM] |
| CLL1-FLT3 T-cell | b.c.t. | >1000 | 15.7 | >1000 | b.c.t. |
| engager molecule 1 | | | | | |
| CLL1-FLT3 T-cell | 85 | 28 | 3.1 | 15 | 45 |
| engager molecule 2 | | | | | |

Legend

| | |
|---|---|
| CLL1-FLT3 T-cell | CL1 9-G4 CC × I2Ccc × scFc × I2Ccc × FL |
| engager molecule 1 | 4-E9 CC |
| CLL1-FLT3 T-cell | CL1 9-G4 CC × I2C × scFc × I2C0 × FL |
| engager molecule 2 | 4-E9 CC |

b.c.t: below calculation threshold

[0617] Results: CLL1-FLT3 T-cell engager molecule 1 showed a higher selectivity gap between double positive and single positive target cells compared to CLL1-FLT3 T-cell engager molecule 2. CLL1-FLT3 T-cell engager molecule 2 contains two high affinity CD3-binding domains (I2C, K_{D} of 1.2E-08M), CLL1-FLT3 T-cell engager molecule 1 contains two CD3-binding domains, that are approximately 100-fold less active than I2C.

### Example 7 Cytokine Profile of Multitargeting Bispecific T-Cell Engager Polypeptides (MBITEP) with Different CD3 Affinities (Low Vs. High

TABLE 22a
EC50 values are shown of CLL1-FLT3 T-cell engager molecules
on double positive CHO huCLL1 huFLT3 target cells after 48 h.

| | CHO huCLL1 huFLT3 |
|---|---|
| | EC50 [pM] |
| CLL1-FLT3 T-cell engager molecule 1 | 0.4 |
| CLL1-FLT3 T-cell engager molecule 2 | 1.9 |
| CLL1-FLT3 T-cell engager molecule 3 | 0.7 |

[0619] In FIG. 7, cytotoxicity curves are shown of CLL1-FLT3 T-cell engager molecules on double positive CHO huCLL1 huFLT3 target cells after 48 h (FIG. 7A) and released cytokines IL-2, IL-6, IL-10, TNFα und IFNγ after 24 h (FIG. 7B-F). IL-4 was below detection threshold and is therefore not shown. Effector cells were unstimulated PBMC.

TABLE 22b
Activity reduction of anti-CD3 binding domains
used in CLL1-FLT3 T-cell engager molecules compared
to high affinity CD3 binding domain I2C

| | Activity reduction of |
|---|---|
| | single CD3-binding domain |
| | in molecule compared to |
| | high affinity CD3 binding |
| | domain I2C with Kp of 1.2E−08M |
| CLL1-FLT3 T-cell engager | Ca 100-fold |
| molecule 1 | |
| CLL1-FLT3 T-cell engager | I2C |
| molecule 2 | |
| CLL1-FLT3 T-cell engager | Ca 98-fold |
| molecule 3 | |

Legend

| | |
|---|---|
| CLL1-FLT3 T-cell | CL1 9-G4 CC × I2Ccc × scFc × FL 4-E9 |
| engager molecule 1 | CC × I2Ccc |
| CLL1-FLT3 T-cell | CL1 9-G4 CC × I2C × (G4S)3 × scFc × |
| engager molecule 2 | (G4S)3 × FL 4-E9 CC × I2C |
| CLL1-FLT3 T-cell | CL1 9-G4 CC × 6H10.09 × scFc × FL 4-E9 |
| engager molecule 3 | CC × 6H10.09 |

[0620] Results: CLL1-FLT3 T-cell engager molecule 1 and 3 showed comparable activity on double positive CHO huCLL1 huFLT3 target cells (0.4 μM and 0.7 μM). CLL1-FLT3 T-cell engager molecule 2 showed a cytotoxic activity of 1.9 μM, which is 4.8-fold and, respectively, 2.7-fold less than molecule 1 and 3. The measured cytokine levels in a cytotoxicity assay with CLL1-FLT3 T-cell engager molecule 2 were higher than CLL1-FLT3 T-cell engager molecules 1 and 3 in all the tested cytokines. CLL1-FLT3 T-cell engager molecule 2 contains two high affinity CD3-binding domains (I2C, K_{D} of 1.2E-08M). CLL1-FLT3 T-cell engager molecule 1 and 3 contain two CD3-binding domains that are approximately 100-fold less active than I2C. Hence, as a general finding, a low affinity CD3 binder can contribute to lower cytokine release.

[0621] For corresponding cytotoxicity and cytokine release examination of CDH3-MSLN T-cell engager molecules, GSU Luc Luciferase-transfected cells expressing CDH3 and MSLN were used.

[0622] Cytokine release during TDCC in-vitro assay was measured with BD™ Cytometric Bead Array Human Th1/Th2 Cytokine Kit II (BD Biosciences, #551809). Therefore, two cytotoxicity assay sets were set up with full PBMC as effector cells. After 48 h, the supernatant of one assay plate set was removed and analyzed for the levels of human cytokines IL-2, IL-4, IL-6, IL-10, TNFα and IFNγ according to the manufacturer's protocol. After 72 h, the cytotoxic activity of the other assay set was measured.

[0623] FIG. 7(G-L): Cytotoxicity curves of CDH3-/MSLN- and CDH3-MSLN T-cell engager molecules on double positive GSU Luc cells after 72 h and released cytokines IL-2, IL-6, IL-10, TNFα und IFNγ after 24 h. Effector cells were unstimulated PBMC.

TABLE 22c
EC50 values are shown of CDH3-/ MSLN- and
CDH3-MSLN T-cell engager molecules on double
positive GSU Luc cells after 72 h
Legend

| | |
|---|---|
| CDH3 T-cell engager | CH3 G8A-BI2 × I2CscFc clone #3 |
| MSLN T-cell engager | MS 5-F11 × I2CO-scFc |
| CDH3-MSLN T-cell engager | CH3 15-E11 CC × I2Lopt × G4 × |
| | scFc × G4 × MS 15-BI2 CC × |
| | I2L_GQ |

| | GSU Luc |
|---|---|
| | EC₅₀ [pM] |
| CDH3 T-cell engager | 155.2 |
| MSLN T-cell engager | 0.84 |
| CDH3-MSLN T-cell engager | 2.33 |

[0624] Results: The CDH3-MSLN T-cell engager molecule showed comparable activity on double positive GSU Luc cells as the MSLN T-cell engager (2.33 pM and 0.84 pM). The CDH3 T-cell engager showed a cytotoxic activity of 155.2 pM, which is 67-fold and 185-fold, respectively, less than both other T-cell engagers. The measured cytokine levels in a cytotoxicity assay with the multitargeting CDH3-MSLN T-cell engager molecule were lower than CDH3− or MSLN-monotargeting T-cell engager molecules in all the tested cytokines. Hence, in general, a multitargeting (e.g. CDH3-MSLN) bispecific (T-cell engaging) molecule of the present invention induces less cytokine release than the corresponding mono targeting (e.g. CDH3 and MSLN, respectively) bispecific antigen-binding molecules individually. Therefore, the multitargeting molecule according to the invention is less prone to induce cytokine release-associated side effects which are typically among the most important ones in immunotherapy.

### Example 8: Selectivity Gap of Multitargeting Bispecific T-Cell Engager Molecules (MBiTEM) on Cancer Cell Line

| | | EC50 [pM] |
|---|---|---|
| MSLN-CDH3 T-cell engager molecule 1 on | HCT 116 WT | 0.07 |
| MSLN-CDH3 T-cell engager molecule 1 on | HCT 116 MSLN KO | 15 |
| MSLN-CDH3 T-cell engager molecule 1 on | HCT 116 CDH3 KO | 612 |

[0626] In FIG. 8, cytotoxicity curves and EC50 values are shown of MSLN-CDH3 T-cell engager molecule 1 on double positive cell line HCT 116 (WT) and CDH3 respectively MSLN Knockout (KO) cell lines. Effector cells were unstimulated Pan T-cells.

TABLE 23
EC50 values and selectivity gaps of double positive cell line HCT
116 (WT) and CDH3 respectively MSLN Knockout (KO) cell lines;

| | | Gap double | | Gap double | |
|---|---|---|---|---|---|
| | HCT 116 | positive to | HCT 116 | positive to | HCT 116 |
| | CDH3 KO | single | WT | single | MSLN KO |
| | EC50 [pM] | positive | EC50 [pM] | positive | EC50 [pM] |
| MSLN-CDH3 T-cell | 612 | 8783 | 0.07 | 216 | 15 |
| engager molecule 1 | | | | | |

| | | EC50 [pM] |
|---|---|---|
| MSLN-CDH3 T-cell engager | SW48 WT | 1.8 |
| molecule 1 on | | |
| MSLN-CDH3 T-cell engager | SW48 MSLN KO | 317 |
| molecule 1 on | | |
| MSLN-CDH3 T-cell engager | SW48 CDH3 KO | 598 |
| molecule 1 on | | |

[0627] In FIG. 9, cytotoxicity curves and EC50 values are shown of MSLN-CDH3 T-cell engager molecule 1 on double positive cell line SW48 (WT) and CDH3 respectively MSLN Knockout (KO) cell lines. Effector cells were unstimulated Pan T-cells.

TABLE 24
EC50 values and selectivity gaps of double positive cell line
SW48 (WT) and CDH3 respectively MSLN Knockout (KO) cell lines;

| | SW48 | Gap double | | Gap double | SW48 |
|---|---|---|---|---|---|
| | CDH3 KO | positive | SW48 WT | positive | MSLN KO |
| | EC50 | to single | EC50 | to single | EC50 |
| | [pM] | positive | [pM] | positive | [pM] |
| MSLN-CDH3 T-cell | 598 | 326 | 1.8 | 173 | 317 |
| engager molecule 1 | | | | | |

Legend

| | |
|---|---|
| MSLN-CDH3 T-cell | MS 15-B12 × I2C 44/100cc × scFc × |
| engager molecule 1 | CH3 15-E11 × I2C44/100cc0 |

[0628] Results: The tested MSLN-CDH3 T-cell engager molecule 1 showed a selectivity gap between double positive target cells and single positive knockout cells over 100-fold on the tested cell lines HCT116 and SW48 and its corresponding knockouts. Cell line HCT116 was measured to have a target antigen copy number level of ca. 2350 Mesothelin Epitopes and ca. 8980 CDH3 Epitopes on each cell's surface. Cell line SW48 has a surface copy number of ca. 4000 Mesothelin Epitopes and 900 CDH3 Epitopes. Independent of the ratios and expression levels of MSLN and CDH3 epitope copy numbers on the target cell surface, the tested MSLN-CDH3 T-cell engager molecule 1 showed a stable selectivity gap >100 on both cell lines.

### Example 9

[0629] FACS-Based Cytotoxicity Assay with Unstimulated Human PBMC

### Isolation of Effector Cells

[0630] Human peripheral blood mononuclear cells (PBMC) were prepared by Ficoll density gradient centrifugation from enriched lymphocyte preparations (buffy coats), a side product of blood banks collecting blood for transfusions. Buffy coats were supplied by a local blood bank and PBMC were prepared on the day after blood collection. After Ficoll density centrifugation and extensive washes with Dulbecco's PBS (Gibco), remaining erythrocytes were removed from PBMC via incubation with erythrocyte lysis buffer (155 mM NH₄Cl, 10 mM KHCO₃, 100 μM EDTA). Remaining lymphocytes mainly encompass B and T lymphocytes, NK cells and monocytes. PBMC were kept in culture at 37° C./5% CO₂ in RPMI medium (Gibco) with 10% FBS (Bio West, #S1810).

### Isolation of Human T-Cells

[0631] For isolation of human T-cells, Pan T Cell Isolation Kit, human (Miltenyi Biotec, MACS, #130-096-535) was used to deplete non-target cells, i.e., monocytes, neutrophils, eosinophils, B cells, stem cells, dendritic cells, NK cells, granulocytes, or erythroid cells from the PBMC cell solution. Therefore, respective number of PBMC was centrifuged for 10 min at room temperature at 300×g. Supernatant was discarded, and the cell pellet was resuspended in MACS isolation buffer (Dulbecco's PBS (Gibco), 100 μM EDTA, 0.5% FBS (Bio West, #S1810)) [40 μl buffer/1×10⁷ cells]. Pan T Cell Biotin-Antibody cocktail [10 μL/1×10⁷ cells] was added and suspension was incubated for 5 min at 4° C. Afterwards, MACS isolation buffer was added [30 μl buffer/1×10⁷ cells] together with Anti-Biotin MicroBeads [20 μl/1×10⁷ cells)] and cell suspension was left at 4° C. for 10 min. The cell solution was then applied to LS Columns (Miltenyi Biotec, #130-042-401) in the magnetic field of a suitable Miltenyi Separator to isolate untouched T cells while magnetically labelled non-T-cells remain on the column. Columns were washed 3 times with MACS isolation buffer. Column flowthrough was centrifued (see above), supernatant was discarded and cells were resuspended in RPMI complete medium i.e. RPMI1640 (Biochrom AG, #FG1215) supplemented with 10% FBS (Bio West, #S1810), 1× non-essential amino acids (Biochrom AG, #K0293), 1 mM sodium pyruvate (Biochrom AG, #L0473) and 100 U/mL penicillin/streptomycin (Biochrom AG, #A2213) and incubated at 37° C. until needed.

### Target Cell Labeling for Flow-Cytometry Based T-Cell-Dependent Cellular Cytotoxicity (TDCC) Assay

[0632] For the analysis of cell lysis in flow cytometry assays, the fluorescent membrane dye DiOC₁₈ (DiO) (Thermo Fisher, #V22886) was used to label human-target transfected CHO cells or cancer cell lines as target cells and distinguish them from effector cells. Briefly, cells were harvested, washed once with PBS and adjusted to 10⁶ cell/mL in PBS containing the membrane dye DiO (5 μL/10⁶ cells). After incubation for 3 min at 37° C., cells were washed twice in complete RPMI medium and directly used in assay.

### Setup of Flow Cytometry-Based T-Cell-Dependent Cellular Cytotoxicity (TDCC) Assay and Analysis

[0633] Cytotoxic activity of T-cell engager molecules of the invention was determined through the capability of inducing T-cell mediated target cell lysis. Therefore, the lysis of human target cells in the presence of serial dilutions of bispecific T-cell engager molecules and effector cells was analyzed.

[0634] DiO-labeled target-cells and effector cells (i.e., Pan T-cells) were mixed at an effector to target-cell (E:T) ratio of 10:1 and incubated with serial dilutions of the corresponding bispecific T-cell engager molecule in 96-well plates. Plates were incubated at 37° C., 5% CO2 and 95% relative humidity for 48 h. On day of assay analysis, cells were transferred to a new 96-well plate and loss of target cell membrane integrity was monitored by adding propidium iodide (PI) at a final concentration of 1 μg/mL. PI is a membrane impermeable dye that normally is excluded from viable cells, whereas dead cells take it up and become identifiable by fluorescent emission.

[0635] Samples were measured by flow cytometry on an iQue Plus (Intellicyt, now Sartorius) instrument and analyzed by Forecyt software (Intellicyt). Target cells were identified as DiO-positive cells. PI-negative target cells were classified as living target cells. Percentage of specific cell lysis respective cytotoxicity was calculated according to the following formula:

$$Cytoxicity [ \% ] = ( \frac{{n}_{dead target cells}}{{n}_{target cells}} ) \times 100$$

$$n = number of events per well$$

[0636] In some experiments, the cytotoxicity was calculated according to this formula:

$$Cytoxicity [ \% ] = ( 1 - \frac{{\%}_{viable target cells BiTE treated}}{{\%}_{viable target cells untreated}} ) \times 100$$

$${\%}_{viable target cells} = ( 1 - \frac{{n}_{dead target cells}}{{n}_{target cells}} ) \times 100$$

$$n = number of events per well$$

[0637] Using GraphPad Prism 7.04 software (Graph Pad Software, San Diego), the percentage of cytotoxicity was plotted against the corresponding bispecific T-cell engager molecule concentrations. Sigmoidal dose response curves were analyzed with the four parametric logistic regression models with variable slope and EC50 values were calculated.

[0638] The following target cell lines were used for the FACS-based cytotoxicity assay:
[0639] CHO huMSLN:
   [0640] Parental CHO (DHFR) cells transfected with human MSLN on pEFDHFR-MTX1 for expression of human MSLN and dummy sequence on pEFDHFR-MTX2
[0641] CHO huEpCAM
   [0642] Parental CHO (DHFR) cells transfected with human EpCAM on pEFDHFR-MTX2 for expression of human EpCAM and dummy sequence on pEFDHFR-MTX1
[0643] CHO huMSLN huEpCAM
   [0644] Parental CHO (DHFR) cells transfected with human MSLN on pEFDHFR-MTX1 and human EpCAM on pEFDHFR-MTX2 for simultaneous expression of human MSLN and human EpCAM
[0645] CHO huCLL1
   [0646] Parental CHO (DHFR) cells transfected with human CLL1 on pEFDHFR for expression of human CLL1
[0647] CHO huFLT3
   [0648] Parental CHO (DHFR) cells transfected with human FLT3 on pEFDHFR for expression of human FLT3
[0649] CHO huCLL1 huFLT3
   [0650] Parental CHO (DHFR) cells transfected with human CLL1 on pEFDHFR-MTX1 and human FLT3 on pEFDHFR-MTX2 for simultaneous expression of human CLL1 and human FLT3
[0651] SW48 WT
   [0652] Parental cell line, wildtype (WT)
[0653] SW48 MSLN KO
   [0654] Parental cell line SW48, in which MSLN gene was knocked out (KO)
[0655] SW48 CDH3 KO
   [0656] Parental cell line SW48, in which CDH3 gene was knocked out (KO)

### Cytokine Measurement of In Vitro TDCC Assay

[0657] Cytokine release during TDCC in-vitro assay was measured with BD™ Cytometric Bead Array Human Th1/Th2 Cytokine Kit II (BD Biosciences, #551809). Therefore, two cytotoxicity assay sets were set up with full PBMC as effector cells. After 24 h, the supernatant of one assay plate set was removed and analyzed for the levels of human cytokines IL-2, IL-4, IL-6, IL-10, TNFα und IFNγ according to the manufacturer's protocol. After 48 h, the cytotoxic activity of the other assay set was measured.

### Setup of Luciferase-Based T-Cell-Dependent Cellular Cytotoxicity (TDCC) Assay and Analysis

[0658] Luc-positive target-cells and effector cells (i.e., Pan T-cells) were mixed at an effector to target-cell (E:T) ratio of 10:1 and incubated with serial dilutions of the corresponding bispecific T-cell engager molecule in 384-well plates. The multitargeting bispecific antigen-binding molecule-mediated cytotoxic reaction proceeded for 48 hours in a 5% CO₂ humidified incubator. Then 25 μL substrate (Steady-Glo® Reagent, Promega) were transferred to the 384-well plate. Only living, luciferase-positive cells react to the substrate and thus create a luminescence signal. Samples were measured with a SPARK microplate reader (TECAN) and analyzed by Spark Control Magellan software (TECAN).

[0659] Percentage of cytotoxicity was calculated as follows:

$$Cytoxicity [ \% ] = ( 1 - \frac{R L {U}_{Sample}}{R L {U}_{N egative Control}} ) \times 100$$

[0660] RLU=relative light units

[0661] Negative-Control=cells without multi-specific antigen-binding molecule

[0662] Using GraphPad Prism 7.04 software (Graph Pad Software, San Diego), the percentage of cytotoxicity was plotted against the corresponding bispecific T-cell engager molecule concentrations. Sigmoidal dose response curves were analyzed with the four parametric logistic regression models with variable slope and EC50 values were calculated.

[0663] Following target cell lines were used for the Luciferase-based cytotoxicity assay:
[0664] HCT 116 LUC WT
   [0665] Parental cell line, wildtype (WT), transfected with luciferase
[0666] HCT 116 LUC MSLN KO
   [0667] Parental cell line HCT 116 LUC, in which MSLN gene was knocked out (KO)
[0668] HCT 116 LUC CDH3 KO
   [0669] Parental cell line HCT 116 LUC, in which CDH3 gene was knocked out (KO)
[0670] GSU LUC WT
   [0671] Parental cell line, wildtype (wt), transfected with luciferase
[0672] GSU LUC MSLN KO
   [0673] Parental cell line GSU LUC wt, in which MSLN gene was knocked out (KO)
[0674] GSU LUC CDH3 KO
   [0675] Parental cell line GSU LUC wt, in which CDH3 gene was knocked out (KO)

### Selectivity Gap of Different Multitargeting Antigen-Binding Molecules

TABLE 25
EC50 values and selectivity gaps of double positive
CHO cells versus single positive CHO cells;

| | | | CHO | | |
|---|---|---|---|---|---|
| | CHO | Gap double | huCLL1 | Gap double | CHO |
| | huCLL1 | positive | huFLT3 | positive | huFLT3 |
| | EC50 | to single | EC50 | to single | EC50 |
| | [pM] | positive | [pM] | positive | [pM] |
| CLL1-FLT3 T-cell | 1198 | 437 | 2.7 | >437 | b.c.t. |
| engager molecule 1 | | | | | |
| CLL1-FLT3 T-cell | 454 | 146 | 3.1 | 706 | 2190 |
| engager molecule 2 | | | | | |

Legend

| | |
|---|---|
| CLL1-FLT3 T-cell | CL1 9-G4 CC × I2C cc × scFc × |
| engager molecule 1 | FL 4-E9 CC × I2C cc |
| CLL1-FLT3 T-cell | I2Ccc × CL1 9-G4 CC × scFc × |
| engager molecule 2 | FL 4-E9 CC × I2Ccc |

b.c.t: below calculation threshold

[0677] Results: CLL1-FLT3 T-cell engager molecule 1 and 2 showed an increased activity (lower EC50 value) on huCLL1 and huFLT3 double positive target cells compared to huCLL1 or huFLT3 single positive target cells. Those molecules showed EC50 selectivity gaps greater 100-fold on double positive target cells versus single positive target cells. CLL1-FLT3 T-cell engager molecule 1 and 2 both have one bispecific entity (one target binding domain and one CD3 binding domain) at the N-terminus and one bispecific entity at the C-terminus, separated by a scFc domain. They differ in the domain arrangement, CLL1-FLT3 T-cell engager molecule 1 has the following arrangement: [target binding domain×CD3 binding domain×scFc×target binding domain×CD3 binding domain], CLL1-FLT3 T-cell engager molecule 2 comprises [CD3 binding domain×target binding domain×scFc×target binding domain×CD3 binding domain].

### Example 10: Selectivity Gap of Single-Chain Multitargeting Bispecific T-Cell Engager Polypeptides Vs. Dual-Chain Multitargeting Bispecific T-Cell Engager Polypeptides

TABLE 26
EC50 values in pM and gaps of naïve
GSU cells versus target knockout GSU cells.

| | EC50 | | EC50 | | EC50 |
|---|---|---|---|---|---|
| | GSU KO | | GSU | | GSU KO |
| | CDH3 | fold | wt | fold | MSLN |
| | [pM] | gap | [pM] | gap | [pM] |
| MSLN-CDH3 T-cell | 289 | 138 | 2.1 | 84 | 177 |
| engager molecule 1 | | | | | |
| MSLN-CDH3 T-cell | 391 | 121 | 3.2 | 165 | 533 |
| engager molecule 2 | | | | | |
| MSLN T-cell | 2.1 | 1 | 3.1 | — | b.c.t. |
| engager molecule 1 | | | | | |
| CDH3 T-cell | b.c.t. | — | 201 | 1 | 180 |
| engager molecule 1 | | | | | |

b.c.t: below calculation threshold

[0679] The tested MSLN-CDH3 T-cell engager molecules 1 and 2 showed increased activity (lower EC50 values) on MSLN and CDH3 double positive GSU wt cells compared to respective GSU KO cells (GSU KO CDH3 and GSU KO MSLN). These molecules showed EC50 selectivity gaps of at least 80-fold on double positive target cells versus single positive target cells. MSLN-CDH3 T-cell engager molecules 1 comprises one multitargeting bispecific T-cell engager polypeptide, whereas MSLN-CDH3 T-cell engager molecule 2 comprises a heterodimer of two different (in combination) multitargeting bispecific T-cell engager polypeptides. Both have the domain arrangement of [target binding domain×CD3 binding domain×spacer×target binding domain×CD3 binding domain]. Mono targeting control T-cell engager molecules had comparable activity on single positive vs. double positive cells (selectivity gap of ˜1).

Legend

| | |
|---|---|
| MSLN-CDH3 T-cell | MS 15-B12 CC × I2L × G4 × scFc × |
| engager molecule 1 | G4 × CH3 15-E11 CC × I2L |
| MSLN-CDH3 T-cell | MS 15-B12 CC × 6H10.09 × (G4) × heFc (A) * |
| engager molecule 2 | heFc (B) × (G4) × CH3 15-E11 CC × 6H10.09 |
| | (Seq ID 311 + 312) |
| MSLN T-cell | MSLN 5F11 × I2C -scFc |
| engager molecule 1 | |
| CDH3 T-cell | CH3 G8A 6-B12 × I2C0-scFc |
| engager molecule 1 | |

[0680] Example 11 Selectivity gap of multitargeting bispecific T-cell engager polypeptides (MBiTEP) with different spacers separating the two bispecific entities

[0681] FIG. 12(A-E) shows cytotoxicity curves and EC50 values of CLL1-FLT3 T-cell engager molecules on double positive CHO huCLL1 huFLT3 target cells and single positive CHO huCLL1 or CHO huFLT3 target cells. Effector cells were unstimulated Pan T-cells.

TABLE 27
EC50 values and selectivity gaps of double positive
CHO cells versus single positive CHO cells;

| | | | CHO | | |
|---|---|---|---|---|---|
| | CHO | Gap double | huCLL1 | Gap double | CHO |
| | huCLL1 | positive | huFLT3 | positive | huFLT3 |
| | EC50 | to single | EC50 | to single | EC50 |
| | [pM] | positive | [pM] | positive | [pM] |
| CLL1-FLT3 T-cell | 135.3 | 50 | 2.7 | 36 | 97.7 |
| engager molecule 1 | | | | | |
| CLL1-FLT3 T-cell | 180 | 74 | 2.4 | 189 | 462 |
| engager molecule 2 | | | | | |
| CLL1-FLT3 T-cell | b.c.t. | >100 | 14.5 | >100 | b.c.t. |
| engager molecule 3 | | | | | |
| CLL1-FLT3 T-cell | 1919 | 834 | 2.3 | >100 | b.c.t. |
| engager molecule 4 | | | | | |
| CLL1-FLT3 T-cell | b.c.t. | >100 | 18.7 | >100 | b.c.t. |
| engager molecule 5 | | | | | |

Legend

| | |
|---|---|
| CLL1-FLT3 T-cell | CL1 9-G4CC × I2C CC × |
| engager molecule 1 | FL 4-E9CC × I2C |
| CLL1-FLT3 T-cell | CL1 9-G4CC × I2C CC × (EAAAK)10 × |
| engager molecule 2 | FL 4-E9CC × I2C |
| CLL1-FLT3 T-cell | CL1 9-G4CC × I2C CC × HSA × |
| engager molecule 3 | FL 4-E9CC × I2C |
| CLL1-FLT3 T-cell | CL1 9-G4CC × I2C CC × scFc × |
| engager molecule 4 | FL 4-E9CC × I2C |
| CLL1-FLT3 T-cell | CL1 9-G4CC × I2C CC × scFc × |
| engager molecule 5 | scFc2 × FL 4-E9CC × I2C |

b.c.t: below calculation threshold

[0682] Results: CLL1-FLT3 T-cell engager molecule 1, 2, 3, 4 and 5 contain the same target binding and CD3 binding domains in the same arrangement [target binding domain×CD3 binding domain×Spacer×target binding domain×CD3 binding domain], but differ in the spacer domain between the bispecific entities. EC50 selectivity gaps between double positive target cells versus single positive target cells greater than 100-fold were seen with CLL1-FLT3 T-cell engager molecule 3, 4 and 5, in which the bispecific entities were separated by spacers of more than 50 amino acids and 5 kDa to provide a center of mass distance of at least about 50 Å. The best combination of selectivity gaps and overall activity on double positive target cells is seen with CLL1-FLT3 T-cell engager molecule 4, where the bispecific entities are separated by 514 amino acids or 54.7 kDa or 101 Å; CLL1-FLT3 T-cell engager molecule 3 and 5 with spacer of 615 amino acids/68.3 kDA/114 Å respectively 998 amino acids/107.5 kDA/153 Å show a slight reduction in overall activity, but still maintain a selectivity gap greater than 100-fold.

TABLE 28
Characteristics of structures used between bispecifc entities

| | | Amino acids | Calculated | Calculated |
|---|---|---|---|---|
| | Spacer | between | kDa between | Center-of- |
| | between | bispecific | bispecific | mass median |
| | entities | entities | entities | distance [Å] |
| CLL1-FLT3 T-cell | G4S | 5 | 0.3 | 47 |
| engager molecule 1 | | | | |
| CLL1-FLT3 T-cell | (EAAAK)₁₀ | 50 | 4.7 | 47 |
| engager molecule 2 | | | | |
| CLL1-FLT3 T-cell | (G₄S)₃ HSA | 615 | 68.3 | 114 |
| engager molecule 3 | (G₄S)₃ | | | |
| CLL1-FLT3 T-cell | (G₄S)₃ scFc | 514 | 54.7 | 101 |
| engager molecule 4 | (G₄S)₃ | | | |
| CLL1-FLT3 T-cell | (G₄S)₃ | 998 | 107.5 | 153 |
| engager molecule 5 | scFc-scFc | | | |
| | (G₄S)₃ | | | |

FIG. 13 (A-E) shows cytotoxicity curves of EpCAM-MSLN T-cell engager molecules on double positive Ovcar8 Wildtype cells and single positive Ovcar8 MSLN KO or Ovcar8 EpCAM KO target cells. Effector cells were unstimulated Pan T-cells.

TABLE 29
EC50 values and selectivity gaps of double positive Ovcar8
WT cells versus single positive Ovcar8 KO cells.

| | Ovcar8 | Gap double | Ovcar8 | Gap double | Ovcar8 |
|---|---|---|---|---|---|
| | EpCAM KO | positive to | WT | positive to | MSLN KO |
| | EC50 | single | EC50 | single | EC50 |
| | [pM] | positive | [pM] | positive | [pM] |
| EpCAM-MSLN T-cell | 3.1 | 23 | 0.13 | 59 | 7.7 |
| engager molecule 1 | | | | | |
| EpCAM-MSLN T-cell | 6.7 | 53 | 0.13 | 133 | 17 |
| engager molecule 2 | | | | | |
| EpCAM-MSLN T-cell | 46 | 75 | 0.6 | 93 | 57 |
| engager molecule 3 | | | | | |
| EpCAM-MSLN T-cell | 149 | 87 | 1.7 | 124 | 212 |
| engager molecule 4 | | | | | |
| EpCAM-MSLN T-cell | 101 | 177 | 0.6 | 213 | 121 |
| engager molecule 5 | | | | | |

| | | Delete | |
|---|---|---|---|
| Legend | | column | |
| EpCAM-MSLN | T-cell | F8C | EpCAM 5-10 × I2Ccc × H2 × |
| engager molecule 1 | | | I2Ccc |
| EpCAM-MSLN | T-cell | W4F | EpCAM 5-10 × I2Ccc × (G4S)10 × |
| engager molecule 2 | | | H2 × I2C6cc44/100 |
| EpCAM-MSLN | T-cell | S2F | EpCAM 5-10 × I2Ccc × PD1 × |
| engager molecule 3 | | | H2 × I2Ccc |
| EpCAM-MSLN | T-cell | J9S | EpCAM 5-10 × I2Ccc × HSA × |
| engager molecule 4 | | | H2 × I2Ccc |
| EpCAM-MSLN | T-cell | F7W | EpCAM 5-10 × I2Ccc × scFc × |
| engager molecule 5 | | | H2 × I2Ccc |

[0683] Results: EpCAM-MSLN T-cell engager molecule 1, 2, 3, 4 and 5 contain the same target binding and CD3 binding domains in the same arrangement [target binding domain×CD3 binding domain×Spacer×target binding domain×CD3 binding domain], but differ in the spacer domains between the bispecific entities. When comparing EpCAM-MSLN T-cell engager molecule 1, 2, 3, 4 and 5, the selectivity gap between double positive target cells versus single positive target cells gets better with increasing spacer separating the bispecific entities, with the best result of >100-fold for EpCAM MSLN T-cell engager molecule 5, where the bispecific entities are separated by 514 amino acids/54.7 kDa/101 Å.

TABLE 30
Characteristics of structure used between bispecific entities

| | | Amino acids | Calculated | Calculated |
|---|---|---|---|---|
| | Spacer | between | kDa between | Center-of- |
| | between | bispecific | bispecific | mass median |
| | entities | entities | entities | distance [Å] |
| EpCAM-MSLN T-cell | G₄S | 5 | 0.3 | 47 |
| engager molecule 1 | | | | |
| EpCAM-MSLN T-cell | (G₄S)₁₀ | 50 | 3.2 | 48 |
| engager molecule 2 | | | | |
| EpCAM-MSLN T-cell | G₄S PD1 G₄S | 153 | 16.6 | 86 |
| engager molecule 3 | | | | |
| EpCAM-MSLN T-cell | (G₄S)₃ HSA (G₄S)₃ | 615 | 68.3 | 114 |
| engager molecule 4 | | | | |
| EpCAM-MSLN T-cell | (G₄S)₃ scFc (G₄S)₃ | 514 | 54.7 | 101 |
| engager molecule 5 | | | | |

### Example 12 Luciferase-Based Cytotoxicity Assay with Unstimulated Human PBMC

### Isolation of Effector Cells

[0684] Human peripheral blood mononuclear cells (PBMC) were prepared by Ficoll density gradient centrifugation from enriched lymphocyte preparations (buffy coats), a side product of blood banks collecting blood for transfusions. Buffy coats were supplied by a local blood bank and PBMC were prepared on the day after blood collection. After Ficoll density centrifugation and extensive washes with Dulbecco's PBS (Gibco), remaining erythrocytes were removed from PBMC via incubation with erythrocyte lysis buffer (155 mM NH₄Cl, 10 mM KHCO₃, 100 μM EDTA). Remaining lymphocytes mainly encompass B and T lymphocytes, NK cells and monocytes. PBMC were kept in culture at 37° C./5% CO₂ in RPMI medium (Gibco) with 10% FCS (Gibco).

Depletion of CD14⁺ and CD56⁺ Cells

[0685] For depletion of CD14+ cells, human CD14 MicroBeads (Milteny Biotec, MACS, #130-050-201) were used, for depletion of NK cells human CD56 MicroBeads (MACS, #130-050-401). PBMC were counted and centrifuged for 10 min at room temperature with 300×g. The supernatant was discarded and the cell pellet resuspended in MACS isolation buffer (60 μL/10⁷ cells). CD14 MicroBeads and CD56 MicroBeads (20 μL/10⁷ cells) were added and incubated for 15 min at 4-8° C. The cells were washed with AutoMACS rinsing buffer (Milteny #130-091-222) (1-2 mL/10⁷ cells). After centrifugation (see above), supernatant was discarded and cells resuspended in MACS isolation buffer (500 μL/10⁸ cells). CD14/CD56 negative cells were then isolated using LS Columns (Milteny Biotec, #130-042-401). PBMC w/o CD14+/CD56+ cells were adjusted to 1.2×10⁶ cells/mL and cultured in RPMI complete medium i.e. RPMI1640 (Biochrom AG, #FG1215) supplemented with 10% FBS (Bio West, #S1810), 1× non-essential amino acids (Biochrom AG, #K0293), 10 mM Hepes buffer (Biochrom AG, #L1613), 1 mM sodium pyruvate (Biochrom AG, #L0473) and 100 U/mL penicillin/streptomycin (Biochrom AG, #A2213) at 37° ° C. in an incubator until needed.

### Target Cell Preparation

[0686] Cells were harvested, spinned down and adjusted to 1.2×10⁵ cells/mL in complete RPMI medium. The vitality of cells was determined using Nucleocounter NC-250 (Chemometec) and Solution18 Dye containing Acridine Orange and DAPI (Chemometec).

### Luciferase Based Analysis

[0687] This assay was designed to quantify the lysis of target cells in the presence of serial dilutions of multi-specific antibody constructs. Equal volumes of Luciferase-positive target cells and effector cells (i.e., PBMC w/o CD14+; CD56+ cells) were mixed, resulting in an E:T cell ratio of 10:1. 42 μL of this suspension were transferred to each well of a 384-well plate. 8 μL of serial dilutions of the corresponding multi-specific antibody constructs and a negative control antibody constructs (a CD3-based antibody construct recognizing an irrelevant target antigen) or RPMI complete medium as an additional negative control were added. The multi-specific antibody-mediated cytotoxic reaction proceeded for 48 hours in a 5% CO₂ humidified incubator. Then 25 μL substrate (Steady-Glo® Reagent, Promega) were transferred to the 384-well plate. Only living, Luciferase-positive cells react to the substrate and thus create a luminescence signal. Samples were measured with a SPARK microplate reader (TECAN) and analyzed by Spark Control Magellan software (TECAN).

[0688] Percentage of cytotoxicity was calculated as follows:

$$Cytoxicity [ \% ] = ( 1 - \frac{R L {U}_{Sample}}{R L {U}_{Negative ‐ Control}} ) \times 100$$

[0689] RLU=relative light units

[0690] Negative-Control=cells without multi-specific antibody construct

[0691] Using GraphPad Prism 7.04 software (Graph Pad Software, San Diego), the percentage of cytotoxicity was plotted against the corresponding multi-specific antibody construct concentrations. Dose response curves were analyzed with the four parametric logistic regression models for evaluation of sigmoid dose response curves with fixed hill slope and EC50 values were calculated.

[0692] Following target cell lines were used for the Luciferase-based cytotoxicity assay:
[0693] GSU-LUC wt (CDH3+ and MSLN+)
[0694] GSU-LUC KO CDH3 (CDH3− and MSLN+)
[0695] GSU-LUC KO MSLN (CDH3+ and MSLN−)
[0696] HCT 116-LUC wt (CDH3+ and MSLN+)
[0697] HCT 116-LUC KO CDH3 (CDH3− and MSLN+)
[0698] HCT 116-LUC KO MSLN (CDH3+ and MSLN−)

| | EC50 |
|---|---|
| | [pM] |
| MSLN-CDH3 T-cell engager molecule 1 on GSU wt | 1.34 |
| MSLN-CDH3 T-cell engager molecule 1 on GSU KO CDH3 | 511.8 |
| MSLN-CDH3 T-cell engager molecule 1 on GSU KO MSLN | 3243.2 |

| | EC50 |
|---|---|
| | [pM] |
| MSLN-CDH3 T-cell engager molecule 2 on GSU wt | 0.35 |
| MSLN-CDH3 T-cell engager molecule 2 on GSU KO CDH3 | 75.2 |
| MSLN-CDH3 T-cell engager molecule 2 on GSU KO MSLN | 244.7 |

### Legend:

[0699] MSLN-CDH3 T-cell engager molecule 1: CH3 15-E11 CC×I2L×G4×scFc xG4×MS 15-B12 CC×I2L_(SEQ ID NO 251)

[0700] MSLN-CDH3 T-cell engager molecule 2: CH3 15-E11 VAG CC×I2L×G4×scFc×MS 15-B12 CC×I2L clipopt ID (SEQ ID NO 434)

### Results:

TABLE 31
EC50 values in pM and gaps of naïve
GSU cells versus knock-out GSU cells

| | EC50 GSU | | EC50 | | EC50 GSU |
|---|---|---|---|---|---|
| | KO MSLN | fold | GSU wt | fold | KO CDH3 |
| | [pM] | gap | [pM] | gap | [pM] |
| MSLN-CDH3 T-cell | 3243.2 | 2429 | 1.34 | 383 | 511.8 |
| engager molecule 1 | | | | | |
| MSLN-CDH3 T-cell | 244.7 | 699 | 0.35 | 215 | 75.2 |
| engager molecule 2 | | | | | |

[0702] The tested MSLN-CDH3 T-cell engager molecules 1&2 showed increased activity (lower EC50 values) on MSLN and CDH3 double positive GSU wt cells compared to respective GSU k.o cells (GSU CDH3 k.o and GSU MSLN k.o.). The MSLN-CDH3 T-cell engager molecules 1&2 showed EC50 gaps greater 100-fold on MSLN and CDH3 double positive GSU wt cells versus the respective GSU k.o cells (GSU CDH3 k.o and GSU MSLN k.o.) (FIG. 14A, B) and Table 31).

| | EC50 [pM] |
|---|---|
| MSLN-CDH3 T-cell engager | 0.07 |
| molecule 1 on HCT 116 wt | |
| MSLN-CDH3 T-cell engager | 51.8 |
| molecule 1 on HCT 116 KO CDH3 | |
| MSLN-CDH3 T-cell engager | 8.7 |
| molecule 1 on HCT 116 KO MSLN | |

| | EC50 [pM] |
|---|---|
| MSLN-CDH3 T-cell engager | 0.01 |
| molecule 2 on HCT 116 wt | |
| MSLN-CDH3 T-cell engager | 5.9 |
| molecule 2 on HCT 116 KO CDH3 | |
| MSLN-CDH3 T-cell engager | 1.5 |
| molecule 2 on HCT 116 KO MSLN | |

### Legend:

[0703] MSLN-CDH3 T-cell engager molecule 1: CH3 15-E11 CC×I2L×G4×scFc xG4×MS 15-B12 CC×I2L_(SEQ ID NO 251) MSLN-CDH3 T-cell engager molecule 2: CH3 15-E11 VAG CC×I2L×G4×scFc×MS 15-B12 CC×I2L clipopt ID (SEQ ID NO 434)

### Results:

TABLE 32
EC50 values in pM and gaps of naïve
HCT 116 cells versus knock-out HCT 116 cells

| | EC50 | | | | EC50 |
|---|---|---|---|---|---|
| | HCT | | EC50 | | HCT |
| | 116 KO | | HCT | | 116 KO |
| | MSLN | fold | 116 wt | fold | CDH3 |
| | [pM] | gap | [pM] | gap | [pM] |
| MSLN-CDH3 T-cell | 8.7 | 122 | 0.07 | 727 | 51.8 |
| engager molecule 1 | | | | | |
| MSLN-CDH3 T-cell | \hat{ } 1.5 | 150 | 0.01 | 590 | 5.9 |
| engager molecule 2 | | | | | |

[0705] The tested MSLN-CDH3 T-cell engager molecules 1&2 showed increased activity (lower EC50 values) on MSLN and CDH3 double positive HCT 116 wt cells compared to respective HCT 116 k.o cells (HCT 116 CDH3 k.o and HCT 116 MSLN k.o.). The MSLN-CDH3 T-cell engager molecules 1&2 showed EC50 gaps greater 100-fold on MSLN and CDH3 double positive HCT 116 wt cells versus the respective HCT 116 k.o cells (HCT 116 CDH3 k.o and HCT 116 MSLN k.o.) (FIG. 14C, D) and Table 32).

### Example 13 Hydroxylation Analysis

### Proteolytic Digestion of MSLN-CDH3 T-Cell Engager Molecules 1 and 2

[0706] Proteolytic digestions were performed on a filter unit using trypsin (1:20 enzyme/substrate ratio, Roche, #03708969001) and human neutrophile elastase (HNE, 1:20 enzyme/substrate ratio, Elastin Products Co., #SE563) at pH 7.8 (37° ° C., trypsin: 1 h, HNE: 30 min). Prior to digestion the protein was denatured (6M guanidine, pH 8.3), reduced (DTT) and alkylated (Sodium Iodoacetate). The proteolysis was quenched with 8M guanidine (pH 4.7).

### LC-MS/MS Measurement and Data Evaluation

[0707] For LC-MS analysis an Agilent 1290 HPLC system connected to a Thermo Scientific™ Q Exactive™ BioPharma platform with an electrospray ion source was used. Separation was performed using a C18 reversed-phase column and gradient elution with mobile phases A (0.1% HCOOH in water) and B (0.1% HCOOH in 90% acetonitrile) at a flow rate of 0.25 ml/min. MS data were produced using full scan positive mode. Additionally, tandem mass spectrometry (MS/MS) data were generated of the most intense ions. Data evaluation and peptide identification was automated using an in-house developed software program.

### MS/MS Analysis

[0708] The tryptic peptide Q³⁹-K⁵⁶ was used to calculate the relative abundance of hydroxylation at position K⁵⁶ in MSLN-CDH3 T-cell enganger molecule 1. The MS area of the hydroxylated peptide Q³⁹-K(Hyl)⁵⁶ (charge state 2+ and 3+) from MSLN-CDH3 T-cell enganger molecule 1 was set as numerator and the sum of unmodified peptide Q³⁹-K⁵⁶ (charge state 2+ and 3+) and hydroxylated peptide Q³⁹-K(Hyl)⁵⁶ (charge state 2+ and 3+) was set as denominator. The y- and b-ion series of tryptic peptides Q³⁹-K⁵⁶, Q³⁹-K(Hyl)⁵⁶ and Q³⁹-K⁶³ from MSLN-CDH3 T-cell enganger molecule 1 and 2 were used for MS/MS verification of the modified and unmodified peptide.

TABLE 33
Relative quantification of hydroxylation at
position K56 in MSLN-CDH3 T-cell engager
molecule 1

| | Re- | | | Theo- | | |
|---|---|---|---|---|---|---|
| | ten- | | | ret- | Ob- | |
| | tion | | | ical | served | |
| Pep- | Time | Charge | | Mass | Mass | MS |
| tide | [min] | State | m/z | [Da] | [Da] | Area |
| QAPG | 48.214 | 2 | 1012.480 | 2021.934 | 2021.935 | 9.09 |
| QC*L | | | | | | e+06 |
| EWMG | | | | | | |
| NIAY | | | | | | |
| GVK | | | | | | |
| QAPG | 48.212 | 3 | 675.320 | | 2021.937 | 2.22+ |
| QC*L | | | | | | 07 |
| EWMG | | | | | | |
| NIAY | | | | | | |
| GVK | | | | | | |
| QAPG | 47.487 | 2 | 1020.470 | 2037.929 | 2037.929 | 1.87 |
| QC*L | | | | | | e+06 |
| EWMG | | | | | | |
| NIAY | | | | | | |
| GVK | | | | | | |
| (H | | | | | | |
| yl) | | | | | | |
| QAPG | 47.487 | 3 | 680.652 | | 2037.931 | 4.63+ |
| QC*L | | | | | | 06 |
| EWMG | | | | | | |
| NIAY | | | | | | |
| GVK | | | | | | |
| (H | | | | | | |
| yl) | | | | | | |

Relative Abundance 17.20%
*carboxymaethylated cysteine: +58.005 Da

TABLE 34
Q³⁹-K⁶³ peptide in MSLN-CDH3 T-cell engager
molecule 2

| | Re- | | | Theo- | | |
|---|---|---|---|---|---|---|
| | ten- | | | ret- | Ob- | |
| | tion | | | ical | served | |
| Pep | Time | Charge | | Mass | Mass | MS |
| tide | [min] | State | m/z | [Da] | [Da] | Area |
| QAPG | 50.930 | 2 | 1386.630 | 2770.25 | 2770.256 | 3.35 |
| QC*L | | | | | | e+06 |
| EWMG | | | | | | |
| NIAY | | | | | | |
| GVAG | | | | | | |
| TNYN | | | | | | |
| QK | | | | | | |
| QAPG | 50.930 | 3 | 924.759 | | 2770.250 | 3.73 |
| QC*L | | | | | | e+07 |
| EWMG | | | | | | |
| NIAY | | | | | | |
| GVAG | | | | | | |
| TNYN | | | | | | |
| QK | | | | | | |

*carboxymaethylated cysteine: +58.005 Da

### Ion Exchange Chromatography of T-Cell Engager Molecules 1 and 2

[0709] For CEX-HPLC analysis an Agilent 1290 HPLC was used. Separation was performed using a cation exchange chromatography column (YMC Co., Ltd., SF00S05-1046WP) and gradient elution with mobile phases A (Thermo Scientific, 085346) and B (Thermo Scientific, 085348) at a flow rate of 1.00 ml/min.

### Results:

[0710] Hydroxylation at position K56 (relative abundance 17.20%, see Table 33) was observed in MSLN-CDH3 T-cell enganger molecule 1. Replacing lysine (K) at position 56 to alanine (A), no hydroxylation at position A56 was observed in MSLN-CDH3 T-cell enganger molecule 2 (see Table 34). Using CEX-HPLC analysis, the resulting CEX main peak heterogeneity of MSLN-CDH3 T-cell enganger molecule 2 was decreased compared to MSLN-CDH3 T-cell enganger molecule 1 (see FIG. 15).

### Example 14: Physicochemical Property Analysis of Molecules of the Invention

### Isolation and Formulation of Monomeric Dual-Targeting Antigen-Binding Molecules and Determination of Protein Yield

[0711] Cell culture supernatant (SN) containing expressed dual-targeting antigen-binding molecules was clarified by centrifugation and filtrated by using a 0.2 μM filtration step.

[0712] Monomeric protein was isolated by applying a two-step purification process on an Äkta Pure 25 system (Cytiva, Freiburg im Breisgau, Germany) generating a selected liquid volume of monomeric dual-targeting antigen-binding molecule followed by formulation and concentration adjustment of this volume.

TABLE 35
Expression yields of monomeric dual-targeting antigen-
binding molecules in a two-step purification process

| | Monomer yield |
|---|---|
| Dual-targeting antigen-binding molecule | [mg/L SN] |
| CH3 15-E11 CC × I2L × G4 × scfc × G4 × MS | 40.6 |
| 15-B12 CC × I2L_GQ | |
| SEQ ID NO 251 | |
| CH3 15-E11_1_VAG_CC × I2L × G4 × scFc × | 12.2 |
| G4 × MS 15-B12 CC × I2L clipopt_DI | |
| SEQ ID NO 434 | |

Expression yields of dual-targeting antigen-binding molecules

### Evaluation of Dual-Targeting Antigen-Binding Molecule Surface Hydrophobicity

[0713] Isolated and formulated dual-targeting antigen-binding molecule monomer adjusted to a defined protein concentration was transferred into autosampler fitting sample vials and measured on an Äkta Purifier 10 FPLC system (Cytiva, Freiburg im Breisgau, Germany). A Hydrophobic Interaction Chromatography HIC column was equilibrated with formulation buffer and a defined volume of protein solution applied at a constant formulation buffer flow. Detection was done by OD280 nm optical absorption. Elution behavior was determined by peak shape respectively mathematically calculation of declining signal peak slope. Steeper slope/higher slope values indicate less hydrophobic interaction of the protein surface compared to constructs with more flat elution behavior and lower slope value.

TABLE 36
HIC elution slopes of dual-targeting antigen-binding molecule

| | HIC |
|---|---|
| Dual-targeting antigen-binding molecule | elution slope |
| CH3 15-E11 CC × I2L × G4 × scfc × G4 × MS 15-B12 | 40.69 |
| CC × I2L_GQ | |
| SEQ ID NO 251 | |
| CH3 15-E11_1_VAG_CC × I2L × G4 × scFc × G4 × | 46.43 |
| MS 15-B12 CC × I2L clipopt_DI | |
| SEQ ID NO 434 | |

Peak slope of analyzed dual-targeting antigen-binding molecule after injection on a HIC column

### Evaluation of Dual-Targeting Antigen-Binding Molecule Aggregation Temperature

[0714] Isolated and formulated dual-targeting antigen-binding molecule monomer adjusted to a defined protein concentration was pipetted in doubles into a 96 well plate and overlaid with paraffin oil. The 96 well plate was transferred to a dynamic light scattering DLS reader (DynaPro Plate Reader II, Wyatt, Dernbach, Germany) capable of heating the plate at a defined rate in a fixed temperature range. Measurement was performed from 40° ° C. to 70° C. at a defined rate of temperature increase. Detection was done by dynamic light scattering determining the hydrodynamic radius of the constructs over the temperature ramp. Temperature at begin of increase of hydrodynamic radius was defined as aggregation temperature.

TABLE 37
DLS aggregation temperature of dual-
targeting antigen-binding molecules

| | Aggregation |
|---|---|
| Dual-targeting antigen-binding molecule | temperature [° C.] |
| CH3 15-E11 CC × I2L × G4 × scfc × G4 × | 58.98 |
| MS 15-B12 CC × I2L_GQ | |
| SEQ ID NO 251 | |
| CH3 15-E11_1_VAG_CC × I2L × G4 × scFc × | 60.42 |
| G4 × MS 15-B12 CC × I2L clipopt_DI | |
| SQ ID NO 434 | |

DLS aggregation temperature of dual-targeting antigen-binding molecules

### Evaluation of Dual-Targeting Antigen-Binding Molecule Long Term Storage Stability

[0715] Isolated and formulated dual-targeting antigen-binding molecule monomer adjusted to a defined protein concentration was aliquoted and stored at 37° C. for one week in a temperature-controlled incubator.

[0716] An analytical SEC column of 15 cm length was connected to an UPLC system (Aquity, Waters, Eschborn, Germany) and equilibrated with a suitable elution buffer. A volume of 10 μl treated dual-targeting antigen-binding molecule monomer solution was injected under a constant flow of elution buffer while detecting optical absorbance at 210 nm wavelength until all protein and formulation constituents were eluted from the column.

[0717] The same procedure was performed for an untreated sample as reference.

[0718] Monomer percentage was calculated by comparing the area of the monomeric main peak to the area of all protein peaks detected.

TABLE 38
Monomer percentage of dual-targeting antigen-binding
molecules after one-week storage at 37° C.

| | Monomer |
|---|---|
| Dual-targeting antigen-binding molecule | decrease [%] |
| CH3 15-E11 CC × I2L × G4 × scfc × G4 × | 0.88 |
| MS 15-B12 CC × I2L_GQ | |
| SEQ ID NO 251 | |
| CH3 15-E11_1_VAG_CC × I2L × G4 × scFc × G4 × | 1.72 |
| MS 15-B12 CC × I2L clipopt_DI | |
| SEQ ID NO 434 | |

Monomer percentage of dual-targeting antigen-binding molecules

### Evaluation of Dual-Targeting Antigen-Binding Molecule Freeze Thaw Stability

[0719] Isolated and formulated dual-targeting antigen-binding molecule monomer adjusted to a defined protein concentration was aliquoted and frozen/thawed at −80° ° C./room temperature three times for 30 min. for each step.

[0720] An analytical SEC Column of 15 cm length was connected to an UPLC system (Aquity, Waters, Eschborn, Germany) and equilibrated with a suitable elution buffer. A volume of treated 10 μl dual-targeting antigen-binding molecule monomer solution was injected under a constant flow of elution buffer while detecting optical absorbance at 210 nm wavelength until all protein and formulation constituents were eluted from the column.

[0721] Monomer percentage was calculated by comparing the area of the monomeric main peak to the area of all protein peaks detected.

TABLE 39
Monomer percentage of dual-targeting antigen-binding
molecules after three freeze/thaw cycles

| | Monomer |
|---|---|
| Dual-targeting antigen-binding molecule | percentage [%] |
| CH3 15-E11 CC × I2L × G4 × scfc × G4 × | 99.52 |
| MS 15-B12 CC × I2L GQ | |
| SEQ ID NO 251) | |
| CH3 15-E11_1_VAG_CC × I2L × G4 × scFc × G4 × | 99.12 |
| MS 15-B12 CC × I2L clipopt_DI | |
| SEQ ID NO 434 | |

Monomer percentage of dual-targeting antigen-binding molecules after three freeze/thaw cycles

### Determination of Dual-Targeting Antigen-Binding Molecule Charge Heterogeneity

[0722] An analytical cation exchange column was connected to an UPLC system (Aquity, Waters, Eschborn, Germany) and equilibrated with a low conductivity equilibration/binding buffer=Buffer_A. A second buffer system with high conductivity suitable for protein elution was also connected to the UPLC system=Buffer_B.

[0723] Detection for the analytical procedure was set to 280 nm optical wavelength.

[0724] A volume of 10 μl dual-targeting antigen-binding molecule monomer solution was injected under a constant flow of Buffer_A buffer.

[0725] After protein binding and washing out of formulation buffer constituents a gradient of Buffer_B was applied at the same flow rate with a linear increase from 0% to 100% Buffer_B.

[0726] Main peak percentage was calculated by comparing the area of the main peak to the area of all protein peaks detected.

TABLE 40
Main peak percentage of dual-targeting antigen-binding
molecules in analytical cation exchange chromatography

| | Monomer |
|---|---|
| Dual-targeting antigen-binding molecule | percentage [%] |
| CH3 15-E11 CC × I2L × G4 × scfc × G4 × | 87.71 |
| MS 15-B12 CC × I2L_GQ | |
| SEQ ID NO 251 | |
| CH3 15-E11_1_VAG_CC × I2L × G4 × scFc × G4 × | 78.30 |
| MS 15-B12 CC × I2L clipopt_DI | |
| SEQ ID NO 434 | |

Main peak percentage of dual-targeting antigen-binding molecules in analytical cation exchange chromatography

### Example 15: Evaluation of CDH3 MSLN Dual Targeting Antigen-Binding Molecules In Vitro Affinity

[0727] Cell-based affinity of CDH3 MSLN dual targeting antigen-binding molecules was determined by nonlinear regression (one site—specific binding) analysis. CHO cells expressing human CDH3, cyno CDH3, human MSLN or cyno MSLN were incubated with decreasing concentrations of CDH3 MSLN dual targeting antigen-binding molecules (12.5 nM on CDH3 cell lines, 800 nM on MSLN cell lines, step 1:2, 11 steps) for 16 h at 4° ° C. Bound CDH3 MSLN dual targeting antigen-binding molecules were detected with Alexa Fluor 488-conjugated AffiniPure Fab Fragment Goat Anti-Human IgG (H+L). Fixed cells were stained with DRAQ5, Far-Red Fluorescent Live-Cell Permeant DNA Dye and signals were detected by fluorescence cytometry. Respective equilibrium dissociation constant (Kd) values were calculated with the one site—specific binding evaluation tool of the GraphPad Prism software. Mean Kd values and affinity gaps were calculated with Microsoft Excel.

TABLE 41
Cell-based affinities of CDH3 MSLN dual targeting antigen-binding molecules

| | Cell based | Cell based | Affinity | Cell based | Cell based | Affinity |
|---|---|---|---|---|---|---|
| | affinity hu | affinity cy | gap | affinity hu | affinity cy | gap |
| | MSLN (Kd) | MSLN (Kd) | Kd_{cy}/Kdₕᵤ | CDH3 (Kd) | CDH3 (Kd) | Kd_{cy}/Kdₕᵤ |
| Molecule | [nM] | [nM] | MSLN | [nM] | [nM] | CDH3 |
| Dual targeting antigen- | 33.78 ± 11.59 | 51.42 ± 9.25 | 1.52 | 0.16 ± 0.04 | 0.19 ± 0.07 | 1.20 |
| binding molecule 1 | | | | | | |
| Dual targeting antigen- | 39.96 ± 38.16 | 50.29 ± 15.77 | 1.26 | 0.51 ± 0.021 | 0.57 ± 0.10 | 1.12 |
| binding molecule 2 | | | | | | |

Cell-based affinities of CDH3 MSLN dual targeting antigen-binding molecules on target-transfected CHO cells were determined by nonlinear regression (one site - specific binding) analysis. Mean Kd values were calculated from three independent measurements. Affinity gaps were determined by dividing the cyno Kd by the human Kd.

### Result

[0728] Cell-based affinity measurements revealed, that CDH3 MSLN dual targeting antigen-binding molecules 1 and 2 have comparable affinities on target-transfected CHO cells expressing human CDH3, cyno CDH3, human MSLN or cyno MSLN. Affinity gaps of both molecules are comparable as well.

### Legend

[0729] CDH3 MSLN dual targeting antigen-binding molecule 1: CH3 15-E11 CC×I2L×G4×scFc×G4×MS 15-B12 CC×I2L_

[0730] CDH3 MSLN dual targeting antigen-binding molecule 2: CH3 15-E11 VAG CC×I2L×G4×scFc×MS 15-B12 CC×I2L clipopt

### Example 16: In Vivo Efficacy Testing of CDH3×MSLN Bispecific Antigen-Binding Molecule

[0731] The therapeutic efficacy in terms of anti-tumor activity was assessed in an advanced stage human tumor xenograft model. On day 1 of the study, 5×10⁶ cells of a human target cell antigen (CDH3×MSLN) positive cancer cell line are subcutaneously injected in the right dorsal flank of female NOD/SCID mice. When the mean tumor volume reaches about 100 mm3, in vitro expanded human CD3 positive T cells are transplanted into the mice by injection of about 2×107 cells into the peritoneal cavity of the animals. Mice of vehicle control group 1 do not receive effector cells and are used as an un-transplanted control for comparison with vehicle control group 2 (receiving effector cells) to monitor the impact of T cells alone on tumor growth. The treatment with CDH3×MSLN bispecific antigen-binding molecule of SEQ ID NO 251 starts when the mean tumor volume reaches about 200 mm3. The mean tumor size of each treatment group on the day of treatment start should not be statistically different from any other group (analysis of variance). Mice are treated with 0.5 mg/kg/day of CHD3×MSLN bispecific antigen-binding molecule by intravenous bolus injection on days of study 9, 16 and 24. Tumors are measured by caliper during the study and progress evaluated by intergroup comparison of tumor volumes (TV). The tumor growth inhibition T/C [%] is determined by calculating TV as T/C %=100×(median TV of analyzed group)/(median TV of control group 2). As it is evident from FIG. 16, treatment with 0.2 mg/kg or 2 mg/kg CHD3×MSLN bispecific antigen-binding molecule effectively inhibited tumor growth in vivo.

### Example 17: Modelling of Multitargeting Bispecific Antigen-Binding Molecules According to the Invention

[0732] Surrogates of multitargeting bispecific antigen-binding molecules of the invention were modelled to measure the inter-domain distances for various linker/spacer sizes (3D model depiction FIG. 17A). Starting molecular models were based on internal structural data of a canonical anti-MSLN molecule comprised of an MSLN-binding scFv and a CD3-binding I2C scFv. Due to providing the highest homology and completeness among available internal and public crystal data, this structure was used to represent both the N- and C-terminal molecule entities in all surrogate models. Missing residues and linkers were added using the Schrodinger software suite (version 2020-4, Schrödinger, NY, US). Similarly, the “spacer” groups of interest (scFc (FIG. 17C), PD1 (FIG. 17H), HSA (FIG. 17G), ubiquitin (FIG. 17I), SAND (FIG. 17J), Beta-2-microglobulin (FIG. 17K) and HSP70-1 (FIG. 17L) were modeled with the Schrodinger suite based on closest public PDB structures (PDB codes 1HZH, 6JJP, and 5VNW respectively) and cross-linked with the 2 molecule copies. Measurements and images were generated with PyMOL (version 2.3.3, Schrödinger, NY, US). The general approach of MD has been explained in the general description of the invention.

TABLE 42
Median and maximum distance conferred by respective
spacers between bispecific entities

| | median distance | max distance |
|---|---|---|
| spacer | (scFv COM) | (scFv COM) |
| G4S | 47 | 61 |
| scFc | 101 | 182 |
| 2 × scFc | 153 | 229 |
| (G4S)10 | 48 | 179 |
| (EAAAK)10 | 47 | 187 |
| HAS | 114 | 183 |
| PD1 | 86 | 156 |

[0733] All spacer lengths (i.e. number of GGGGS monomer repeats) were based on sequences of experimentally-tested molecules. Each homology model was built in an extended conformation, maximizing the center-of-mass (COM) distance between the N-terminal I2C (CD3 binder) and C-terminal MSLN-binder (target binder). Hence, the starting molecule conformations are indicative of the maximum COM distance each molecule could theoretically achieve. To probe the stability of these conformations, each model was subjected to a 200 nanosecond (100 ns in case of the double scFc spacer due very slow simulations speed) explicit-solvent MD simulation with Desmond, a component of the Schrodinger suite. A general observation for all 11 simulated systems (respective spacers: G4S, scFc, 2×scFc, (G4S)10, (EAAAK)10, HSA, PD1, ubiquitin, SAND, Beta-2microblobulin, HSP70-1) was a reduction of the inter-scFv COM distance indicating that the extended conformations are only (if at all) possible in presence of the targets (the N- and C-terminal antigen-binding molecule structures remained largely unchanged due to corresponding to a stable crystal structure conformation). For the large spacers with defined secondary structures (scFc, 2×scFc (FIG. 17D), HSA, PD1) the distance reduction was small to moderate and the scFv moieties remained clearly separated at the end of each simulation (median COM distances upon discarding the first half of each simulation: 101, 153, 114, and 86 Å respectively). The flexible (G4S)10 and (EAAAK)10 linkers “collapsed” into more compact conformations, bringing the scFv moieties much closer together (median COM distance of 48 and 47 Å). Out of these 2 linkers, (EAAAK)10 led to a slightly more stable conformation which might be associated with higher selectivity. The short G4S linker was unable to keep the scFv moieties apart and they were seen to strongly interact throughout the entire simulation (median COM distance of 47 Å but with the VH CDR3 loops much closer to each other than in any other system). Ubiquitin as a spacer of 73 aa maintained Center-of-mass median distance between 1^{st} CD3 scFv and 2^{nd} MSLN scFv of 67 Å, meaning effective separation. SAND as a spacer of 89 aa maintained Center-of-mass median distance between 1^{st} CD3 scFv and 2^{nd} MSLN scFv of 77 Å. Beta-2-microglobulin as a spacer of 97 aa maintained Center-of-mass median distance between 1st CD3 scFv and 2^{nd} MSLN scFv of 95 Å, i.e. comparable to preferred scFc. In contrast, HSP70-1 as a spacer of 378 aa did maintained Center-of-mass median distance between 1^{st} CD3 scFv and 2^{nd} MSLN scFv of only 48 Å indicating insufficient separation of the two bispecific entities. The simulation of the molecule with beta-2-microglobulin (FIG. 17M left) and HSP70-1 (FIG. 17M right) is visualized by respective representative structures which indicate presence and absence of separation by the spacer, respectively.

[0734] Like shown above for a molecule with two MSLN target binders, good separation and scFv mobility by scFc (SEQ ID NO: 25) as spacer in the context of the present invention was observed for MSLN and FOLR1 as target binders showing center-of-mass median distance between 1^{st} CD3 scFv and FolR1 scFv of 99 Å (FIG. 17N) and for MSLN and CDH19 as target binders showing center-of-mass median distance between 1^{st} CD3 scFv and CDH19 scFv: 76 Å (FIG. 17O).

### Example 18 Comparative Clinical Safety Study of Multitargeting Bispecific Antigen-Binding Molecule According to the Invention in Cynomolgus Monkey

[0735] A monotargeting mesothelin (MSLN)-targeting bispecific antigen-binding molecule (molecule 1, SEQ ID NO 1183) that showed in vitro efficacy was evaluated in a repeat-dose toxicology study in cynomolgus monkey, a pharmacologically relevant species. Molecule 1 was administered at doses of 0.1, 1.5, 5/1.5, or 15 g/kg by 30-minute intravenous infusion (three animals/sex/group) once weekly for 4 weeks (i.e. administered on Days 1, 8, 15, and 22). Animals from the 5/1.5 μg/kg group received 5 μg/kg on Day 1 and 1.5 μg/kg from Day 8 onwards. Scheduled necropsy was conducted at the end of the dosing phase on Day 29, or after a 4-week recovery period on Day 57. Molecule 1-related clinical and anatomic pathologic changes were generally similar between unscheduled (Days 3, 4, or 8) and scheduled (Days 29, 57) euthanasia cohorts, albeit with an increase in incidence and severity in unscheduled euthanasia individuals.

[0736] Molecule 1 showed dose-limiting toxicity with widespread tissue effects in vivo. Doses of 1.5 μg/kg, 5 μg/kg and 15 μg/kg were not tolerated. A single male animal at 1.5 μg/kg. 3 males and 2 females at 5 μg/kg, and all animals at 15 μg/kg were euthanized for humane reasons on Day 3 or 4. In addition, one female animal that received one dose at 5 μg/kg on Day 1 followed by a single dose at 1.5 μg/kg on Day 8 was euthanized on Day 8 due to declining clinical condition. These animals had severe clinical signs, which included dehydration, decreased activity, decreased food consumption, and hunched appearance. Additional Molecule 1-related clinical signs in scheduled euthanasia animals included lack of feces, vomitus material, reduced appetite and decrease in mean body weights. Molecule 1-induced pharmacological effects indicative of the bispecific T cell engager mode of action, such as (but not limited to) an acute phase response (typified by elevated C-reactive protein), transient cytokine release and changes in activation of circulating lymphocytes.

[0737] At ≥1.5 μg/kg, administration of molecule 1 resulted in multi-organ inflammation involving mesothelin-expressing tissues/cell types including mesothelial cell-lined serosal surfaces of abdominal and thoracic viscera and epithelium of several tissues, often involving basilar layers. Inflammation and fibroplasia/fibrosis associated with mesothelial cell-lined serosal surfaces culminated in formation of visceral adhesions in some animals. Adhesions were apparent macroscopically in the liver and heart (pericardium) in a few animals treated at 1.5 μg/kg on Day 29, but serosal fibroplasia was more widespread microscopically. Tissues that demonstrated serosal or capsular changes on organ surfaces included the following (all fates): kidney, liver, heart, spleen, lung, stomach, duodenum, jejunum, ileum, cecum, colon, rectum, mesentery, urinary bladder, ovary, cervix, and uterus. Tissues that demonstrated epithelial changes included the following (all fates): kidney, urinary bladder, esophagus, cervix, epididymis, conjunctiva, mammary gland, mandibular salivary gland, seminal vesicle, skin, duodenum, stomach, tongue, tonsil, trachea, uterus, and vagina. Mesothelial and epithelial-related changes were associated with secondary reactive tissue changes including epithelial degeneration/necrosis, erosion/ulceration, regeneration, edema with fibrin exudation and/or hemorrhage. Glomerular changes were associated with mild increased glomerular mesangium. Clinical pathology changes were consistent with both systemic and tissue specific inflammatory responses.

[0738] Light microscopic changes partially recovered in several tissues at 0.10 and 5/1.5 μg/kg after 4 weeks without treatment; most fibrotic changes were not fully reversible. The highest non-severely toxic dose level (HNSTD) for molecule 1 was determined to be 0.1 μg/kg.

[0739] To reduce toxicity, molecule 2 (SEQ ID NO: 251, CH3 15-E11 CC×I2Lopt×G4×scFc SEFL2 clipopt×G4×MS 15-B12 CC×I2L_GQ) was developed as a multitargeting (CDH3-MSLN) bispecific antigen-binding molecule in which also a lower affinity MSLN binder was used. Such lower affinity binder was possible due to the aviditiy effect of the two preferably low affinity binders of the multitargeting bispecific molecule according to the present invention. This molecule 2 is preferably only active if both antitumor targets are bound simultaneously as generally described herein. In vitro efficacy of molecule 2 against human carcinoma cell lines expressing both targets, was comparable to molecule 1. FIG. 19 shows an example cytotoxicity assay in which human T cells were incubated with the human gastric cancer cell line GSU Luc at an ET ratio of 10:1 for 72 hours. The resulting EC₅₀ values were within a similar range (2.078 μM for molecule 1 versus 1.060 μM for molecule 2, respectively, see FIG. 19).

[0740] To evaluate whether molecule 2 reduced MSLN-directed toxicity, a repeat-dose toxicology study was conducted in male cynomolgus monkeys via slow IV bolus administration at doses of 1, 10, 100 or 1000 μg/kg on Day 1, 8 and 15. There were no mortalities, and no treatment-related clinical signs, or effects on body weight, food consumption, body temperature, ophthalmoscopic examinations, or coagulation or urinalysis parameters. Similar to molecule 1, molecule 2 induced pharmacological effects indicative of the bispecific T cell engager molecule mode of action, such as (but not limited to) an acute phase response (typified by elevated C-reactive protein), transient cytokine release and changes in activation of circulating lymphocytes.

[0741] Administration of molecule 2 at ≥10 μg/kg was associated with light microscopic changes including generally minimal or mild mononuclear or mixed inflammatory cell infiltration of the serosa of multiple organs, associated with focal/multifocal mesothelial hypertrophy. Additional microscopic changes such as mucosal hypertrophy/hyperplasia in the esophagus, mixed cell infiltration in the tongue (with epithelial degeneration of the mucosa) and trachea (with goblet cell hypertrophy), and stress-related atrophy of the thymus were noted in 2 animals dosed at 100 μg/kg or 1000 μg/kg.

[0742] In contrast to molecule 1, molecule 2 induced less severe histopathological changes at 1000 μg/kg than molecule 1 at 1.5 μg/kg. FIG. 20 shows representative histopathological hematoxylin/eosin staining of liver (FIG. 20A, B) and lung (FIG. 20C, D) from an animal treated with 1.5 μg/kg molecule 1 (A. C) and an animal treated with 1000 μg/kg molecule 2 (B, D). Whereas molecule 1 had induced marked capsular fibroplasia/fibrosis (A) and formation of interlobar adhesions in the liver at the end of the dosing period on Day 29, molecule 2 only induced minimal multifocal mesothelial hypertrophy and mixed cell infiltration/inflammation of the serosa at the end of the dosing period on Day 16 (B). No adhesions were noted in any animal treated with molecule 2. Similarly, while molecule 1 induced moderate fibroplasia/fibrosis of the lung pleura (D), the lung of the animal treated with molecule 2 did not show fibroplasia/fibrosis (D).

### CONCLUSION

[0743] A dose of 1.5 μg/kg molecule 1 was not tolerated and resulted in mortality whereas a dose of 0.1 μg/kg was tolerated. Conversely, molecule 2 was tolerated at doses of up to 1000 μg/kg. Histopathological changes seen with molecule 1 were generally more severe at doses of 1.5 μg/kg than those with molecule 2 at 1000 μg/kg, respectively. Adhesions or irreversible fibrotic changes as induced by molecule 1 were absent after treatment with molecule 2. Therefore, the tolerability of molecule 2 is about 600 (histopathology) to 10.000 (tolerated dose) times higher than for molecule 1, despite equivalent in vitro potency against tumor cells.

### Example 19 Selectivity Gap of Single-Chain Multitargeting Bispecific T-Cell Engager Molecule Vs. Dual-Chain Multitargeting Bispecific T-Cell Engager Molecule

[0744] The assays were prepared as in previous cytotoxicity Examples on MSLN-CDH3 T-cell engager molecules of the present invention.

TABLE 43
EC50 values in pM and gaps of naïve
GSU cells versus target knockout GSU cells.

| | EC50 GSU | Fold | | Fold | EC50 GSU |
|---|---|---|---|---|---|
| | KO CDH3 | selectivity | EC50 GSU | selectivity | KO MSLN |
| | [pM] | gap | wt [pM] | gap | [pM] |
| MSLN-CDH3 T-cell | 289 | 138 | 2.1 | 84 | 177 |
| engager molecule 1 | | | | | |
| MSLN-CDH3 T-cell | 391 | 121 | 3.2 | 165 | 533 |
| engager molecule 2 | | | | | |
| MSLN T-cell | 2.1 | 1 | 3.1 | — | b.c.t. |
| engager molecule 1 | | | | | |
| CDH3 T-cell | b.c.t. | — | 201 | 1 | 180 |
| engager molecule 1 | | | | | |

b.c.t: below calculation threshold

[0745] The tested MSLN-CDH3 T-cell engager molecules 1 and 2 showed increased activity (lower EC50 values) on MSLN and CDH3 double positive GSU wt cells compared to respective GSU KO cells (GSU KO CDH3 and GSU KO MSLN). These molecules showed EC50 selectivity gaps greater 80-fold on double positive target cells versus single positive target cells. MSLN-CDH3 T-cell engager molecules 1 comprises one multitargeting bispecific T-cell engager polypeptide chain, whereas MSLN-CDH3 T-cell engager molecule 2 comprises two bispecific T-cell engager polypeptide chains which are linked by a heterodimer Fc to build a two-chained multitargeting bispecific T-cell engager molecule. Both have the domain arrangement of [target binding domain×CD3 binding domain×spacer×target binding domain×CD3 binding domain]. Mono targeting control T-cell engager molecules had comparable activity on single positive vs. double positive cells (selectivity gap of ˜1).

Legend

| | |
|---|---|
| MSLN-CDH3 T-cell | MS 15-B12 CC × I2L × G4 × |
| engager molecule 1 | scFc × G4 × CH3 15-E11 CC × I2L |
| | (SEQ ID NO: 1078) |
| MSLN-CDH3 T-cell | MS 15-B12 CC × 6H10.09 × (G4) × |
| engager molecule 2 | heFc (A) * heFc (B) × (G4) × CH3 |
| | 15-E11 CC × 6H10.09 (Seq ID 326 + 327) |
| MSLN T-cell | MSLN 5F11 × I2C -scFc (EQ ID NO: 1183) |
| engager molecule 1 | |
| CDH3 T-cell | CH3 G8A 6-B12 × I2C0-scFc |
| engager molecule 1 | |

[0746] Example 20 Selectivity gap of multitargeting bispecific T-cell engager polypeptides (MBiTEP) with varied CD3 affinities The assays were prepared as in previous cytotoxicity Examples on MSLN-CDH3 T-cell engager molecules of the present invention.

TABLE 44
EC50 values and selectivity gaps of naive
GSU cells versus target knockout GSU cells.

| | EC50 GSU | fold | EC50 | fold | EC50 GSU |
|---|---|---|---|---|---|
| | KO CDH3 | selectivity | GSU wt | selectivity | KO MSLN |
| | [pM] | gap | [pM] | gap | [pM] |
| MSLN-CDH3 T-cell | 23.0 | 51 | 0.45 | 118 | 53.3 |
| engager molecule 1 | | | | | |
| MSLN-CDH3 T-cell | 19.6 | 30 | 0.66 | 108 | 71.2 |
| engager molecule 2 | | | | | |
| MSLN-CDH3 T-cell | 1.1 | 3 | 0.35 | 2 | 0.8 |
| engager molecule 3 | | | | | |
| MSLN-CDH3 T-cell | 6.9 | 24 | 0.28 | 84 | 17.7 |
| engager molecule 4 | | | | | |
| MSLN-CDH3 T-cell | 2.0 | 18 | 0.11 | 16 | 1.7 |
| engager molecule 5 | | | | | |
| MSLN-CDH3 T-cell | 2.6 | 58 | 0.04 | 284 | 12.7 |
| engager molecule 6 | | | | | |
| MSLN-CDH3 T-cell | 6.0 | 13 | 0.48 | 22 | 10.6 |
| engager molecule 7 | | | | | |
| MSLN T-cell | 1.0 | 1 | 1.02 | — | b.c.t. |
| engager molecule 1 | | | | | |
| CDH3 T-cell | b.c.t. | — | 70.16 | 1 | 64.5 |
| engager molecule 1 | | | | | |

b.c.t .: below calculation threshold (see also FIG. 22)

TABLE 45
Activity reduction of CD3 binding domains used in MSLN-
CDH3 T-cell engager molecules compared to high affinity CD3
binding domain I2C with K_{D} of 1.2E−08M

| | Activity reduction of |
|---|---|
| | single CD3 binding domain |
| | in molecule compared to |
| | high affinity binding |
| | domain I2C with K_{D} 1.2E−08M |
| MSLN-CDH3 T-cell | Ca 100-fold |
| engager molecule 1 | |
| MSLN-CDH3 T-cell | Ca 98-fold |
| engager molecule 2 | |
| MSLN-CDH3 T-cell | I2C |
| engager molecule 3 | |
| MSLN-CDH3 T-cell | Ca 6-11 |
| engager molecule 4 | |
| MSLN-CDH3 T-cell | Ca 32-fold |
| engager molecule 5 | |
| MSLN-CDH3 T-cell | Ca 32- resp. 98-fold |
| engager molecule 6 | |
| MSLN-CDH3 T-cell | Ca 98- resp. 32-fold |
| engager molecule 7 | |

[0747] Results: MSLN-CDH3 T-cell engager molecules 1, 2, 4, 5, 6 and 7 demonstrated an EC50 selectivity gap between double positive GSU wt cells compared to respective GSU KO cells (GSU KO CDH3 and GSU KO MSLN) greater 10-fold, whereat MSLN-CDH3 T-cell engager molecule 1 and 2 showed the best selectivity gap. MSLN-CDH3 T-cell engager molecules 1, 2, 4 and 5 contain two identical CD3-binding domains that are between 11- to 100-fold less active than the reference CD3 binding domain I2C with an K_{D} of 1.2E-08M. The two CD3-binding domains in MSLN-CDH3 T-cell engager molecules 6 and 7 are not identical and still demonstrated an activity gap between GSU wt and respective GSU KO cells, with a low EC50 value on double positive cell. MSLN-CDH3 T-cell engager molecule 3 contains two high affinity CD3 binding domains I2C and only showed an increase in activity of maximum 3-fold on double positive vs. single positive cells. Mono targeting control T-cell engager molecules had comparable activity on single positive vs. double positive cells (selectivity gap of ˜1).

Legend

| | |
|---|---|
| MSLN-CDH3 T-cell | MS 15-B12 CC × I2C 44/100cc × scFc × |
| engager molecule 1 | CH3 15-E11 CC × I2C 44/100cc |
| MSLN-CDH3 T-cell | MS 15-B12 CC × I2L × scFc × |
| engager molecule 2 | CH3 15-E11 CC × I2L |
| MSLN-CDH3 T-cell | MS 15-B12 CC × I2C × scFc × |
| engager molecule 3 | CH3 15-E11 CC × I2C0 |
| MSLN-CDH3 T-cell | MS 15-B12 CC × 4F10.03 I2M × scFc × |
| engager molecule 4 | CH3 15-E11 CC × 4F10.03 I2M |
| MSLN-CDH3 T-cell | MS 15-B12 CC × I2M2 × scFc × CH3 |
| engager molecule 5 | 15-E11 CC × I2M2 |
| MSLN-CDH3 T-cell | MS 15-B12 CC × I2M2 × scFc × CH3 |
| engager molecule 6 | 15-E11 CC × I2L |
| MSLN-CDH3 T-cell | MS 15-B12 CC × I2L × scFc × CH3 15-E11 |
| engager molecule 7 | CC × I2M2 |
| MSLN T-cell | MSLN 5F11 × I2C -scFc |
| engager molecule 1 | |
| CDH3 T-cell | CH3 G8A 6-B12 × I2C0-scFc |
| engager molecule 1 | |

### Example 21: Selectivity Gap of Multitargeting Bispecific T-Cell Engagers Targeting Different CDH3 and MSLN Epitope Clusters

[0748] Luciferase-Based Assay with Unstimulated Human PBMC

### Isolation of Effector Cells

[0749] Human peripheral blood mononuclear cells (PBMC) were prepared by Ficoll density gradient centrifugation from enriched lymphocyte preparations (buffy coats), a side product of blood banks collecting blood for transfusions. Buffy coats were supplied by a local blood bank and PBMC were prepared on the day after blood collection. After Ficoll density centrifugation and extensive washes with Dulbecco's PBS (Gibco), remaining erythrocytes were removed from PBMC via incubation with erythrocyte lysis buffer (155 mM NH₄Cl, 10 mM KHCO₃, 100 μM EDTA). Remaining lymphocytes mainly encompass B and T lymphocytes, NK cells and monocytes. PBMC were kept in culture at 37° C./5% CO₂ in RPMI medium (Gibco) with 10% FCS (Gibco).

Depletion of CD14⁺ and CD56⁺ Cells

[0750] For depletion of CD14+ cells, human CD14 MicroBeads (Milteny Biotec, MACS, #130-050-201) were used, for depletion of NK cells human CD56 MicroBeads (MACS, #130-050-401). PBMC were counted and centrifuged for 10 min at room temperature with 300×g. The supernatant was discarded and the cell pellet resuspended in MACS isolation buffer (60 μL/10⁷ cells). CD14 MicroBeads and CD56 MicroBeads (20 μL/10⁷ cells) were added and incubated for 15 min at 4-8° C. The cells were washed with AutoMACS rinsing buffer (Milteny #130-091-222) (1-2 mL/10⁷ cells). After centrifugation (see above), supernatant was discarded and cells resuspended in MACS isolation buffer (500 μL/10⁸ cells). CD14/CD56 negative cells were then isolated using LS Columns (Milteny Biotec, #130-042-401). PBMC w/o CD14+/CD56+ cells were adjusted to 1.2×10⁶ cells/mL and cultured in RPMI complete medium i.e. RPMI1640 (Biochrom AG, #FG1215) supplemented with 10% FBS (Bio West. #S1810), 1× non-essential amino acids (Biochrom AG, #K0293), 10 mM Hepes buffer (Biochrom AG, #L1613), 1 mM sodium pyruvate (Biochrom AG, #L0473) and 100 U/mL penicillin/streptomycin (Biochrom AG, #A2213) at 37° ° C. in an incubator until needed.

### Target Cell Preparation

[0751] Cells were harvested, spinned down and adjusted to 1.2×10⁵ cells/mL in complete RPMI medium. The vitality of cells was determined using Nucleocounter NC-250 (Chemometec) and Solution18 Dye containing Acridine Orange and DAPI (Chemometec).

### Luciferase Based Analysis

[0752] This assay was designed to quantify the lysis of target cells in the presence of serial dilutions of multi-specific antibody constructs. Equal volumes of Luciferase-positive target cells and effector cells (i.e., PBMC w/o CD14⁺; CD56⁺ cells) were mixed, resulting in an E:T cell ratio of 10:1. 42 μL of this suspension were transferred to each well of a 384-well plate. 8 μL of serial dilutions of the corresponding multi-specific antibody constructs and a negative control antibody constructs (a CD3-based antibody construct recognizing an irrelevant target antigen) or RPMI complete medium as an additional negative control were added. The multi-specific antibody-mediated cytotoxic reaction proceeded for 48 hours in a 5% CO₂ humidified incubator. Then 25 μL substrate (Steady-Glo® Reagent, Promega) were transferred to the 384-well plate. Only living, Luciferase-positive cells react to the substrate and thus create a luminescence signal. Samples were measured with a SPARK microplate reader (TECAN) and analyzed by Spark Control Magellan software (TECAN).

[0753] Percentage of cytotoxicity was calculated as follows:

$$Cytoxicity [ \% ] = ( 1 - \frac{R L {U}_{Sample}}{R L {U}_{Negative ‐ Contro1}} ) \times 100$$

[0754] RLU=relative light units

[0755] Negative-Control=cells without multi-specific antibody construct

[0756] Using GraphPad Prism 7.04 software (Graph Pad Software, San Diego), the percentage of cytotoxicity was plotted against the corresponding multi-specific antibody construct concentrations. Dose response curves were analyzed with the four parametric logistic regression models for evaluation of sigmoid dose response curves with fixed hill slope and EC50 values were calculated.

[0757] Following target cell lines were used for the Luciferase-based cytotoxicity assay:
[0758] HCT 116-LUC wt (CDH3+ and MSLN+)
[0759] HCT 116-LUC KO CDH3 (CDH3− and MSLN+)
[0760] HCT 116-LUC KO MSLN (CDH3+ and MSLN−)
[0761] CHO human CDH3+ and MSLN+
[0762] CHO human CDH3+
[0763] CHO human MSLN+

TABLE 46
EC50 values of MSLN-CDH3 T-cell engagers, targeting different
CDH3 epitope clusters on respective cell lines.

| | EC50 [pM] |
|---|---|
| MSLN-CDH3 T-cell engager | 0.07 |
| molecule 1 on HCT 116 wt | |
| MSLN-CDH3 T-cell engager | 51.8 |
| molecule 1 on HCT 116 KO CDH3 | |
| MSLN-CDH3 T-cell engager | 8.7 |
| molecule 1 on HCT 116 KO MSLN | |
| MSLN-CDH3 T-cell engager | 0.201 |
| molecule 2 on HCT 116 wt | |
| MSLN-CDH3 T-cell engager | 19.3 |
| molecule 2 on HCT 116 KO CDH3 | |
| MSLN-CDH3 T-cell engager | 40.9 |
| molecule 2 on HCT 116 KO MSLN | |
| MSLN-CDH3 T-cell engager | 1.557 |
| molecule 3 on HCT 116 wt | |
| MSLN-CDH3 T-cell engager | 85.41 |
| molecule 3 on HCT 116 KO CDH3 | |
| MSLN-CDH3 T-cell engager | 413.3 |
| molecule 3 on HCT 116 KO MSLN | |
| MSLN-CDH3 T-cell engager | 5.53 |
| molecule 4 on HCT 116 wt | |
| MSLN-CDH3 T-cell engager | 267.87 |
| molecule 4 on HCT 116 KO CDH3 | |
| MSLN-CDH3 T-cell engager | 495.43 |
| molecule 4 on HCT 116 KO MSLN | |
| MSLN-CDH3 T-cell engager | 1.27 |
| molecule 5 on HCT 116 wt | |
| MSLN-CDH3 T-cell engager | 58.54 |
| molecule 5 on HCT 116 KO CDH3 | |
| MSLN-CDH3 T-cell engager | 71.0 |
| molecule 5 on HCT 116 KO MSLN | |

### Legend for CDH3 Epitope Cluster Analysis:

[0764] MSLN-CDH3 T-cell engager molecule 1: CH3 15-E11 CC×I2L×G4×scFc xG4×MS 15-B12 CC×I2L_GQ

[0765] MSLN-CDH3 T-cell engager molecule 2: MS 15-B12 CC×I2L×(G4S)3×scFc×(G4S)3×CH3 24-D7 CC×I2L

[0766] MSLN-CDH3 T-cell engager molecule 3: MS 15-B12 CC×I2L×G4×scFc×G4×CH3 22-A12 CC×I2L

[0767] MSLN-CDH3 T-cell engager molecule 4: MS 15-B12 CC×I2L×G4×scFc×G4×CH3 005-D5 CC×I2L

[0768] MSLN-CDH3 T-cell engager molecule 5: MS 15-B12 CC×I2L×(G4S)3×scFc×(G4S)3×CH3 26-E5 CC×I2L

[0769] Positive control molecule 1: MS 5-F11×I2C scFc6

[0770] Positive control molecule 2: CH3 G8A 6-B12×I2C0-scFc

[0771] Negative control molecule 1: EGFRVIII×I2C0×scFc

### Results:

TABLE 47
EC50 values in pM and gaps of naïve
HCT 116 cells versus knock-out HCT 116 cells

| | | | EC50 CHO | | |
|---|---|---|---|---|---|
| | EC50 CHO hu | | hu CDH3 (+) | | EC50 CHO |
| | MSLN (+) | | & MSLN (+) | | hu CDH3 (+) |
| | [pM] | fold gap | [pM] | fold gap | [pM] |
| MSLN-CDH3 T-cell | 8.7 | 122 | 0.071 | 727 | 51.8 |
| engager molecule 1 | | | | | |
| MSLN-CDH3 T-cell | 19.3 | 96 | 0.201 | 203 | 40.9 |
| engager molecule 2 | | | | | |
| MSLN-CDH3 T-cell | 413.3 | 265 | 1.557 | 55 | 85.4 |
| engager molecule 3 | | | | | |
| MSLN-CDH3 T-cell | 445.4 | 90 | 5.53 | 48 | 267.9 |
| engager molecule 4 | | | | | |
| MSLN-CDH3 T-cell | 71 | 56 | 1.272 | 46 | 58.5 |
| engager molecule 5 | | | | | |

[0773] The tested MSLN-CDH3 T-cell engager molecules showed all increased activity (lower EC50 values) on MSLN and CDH3 double positive HCT 116 wt cells compared to respective HCT 116 k.o cells (HCT 116 CDH3 k.o and HCT 116 MSLN k.o.). The MSLN-CDH3 T-cell engager molecules 1 and 2 showed EC50 selectivity gaps greater ˜100-fold (on both sites) on double positive target cells versus single positive target cells and are, thus, preferred (FIG. 23) and (Table 47). The tested MSLN-CDH3 T-cell engager molecules 3, 4 & 5 showed EC50 selectivity gaps lower 100-fold on double positive target cells versus single positive target cells (FIG. 23) and (Table 47). The tested MSLN-CDH3 T-cell engager molecules 1&2 contain CDH3 binder of the epitope D4B. The tested MSLN-CDH3 T-cell engager molecules 3 contains a CDH3 binder of the epitope D1B. The tested MSLN-CDH3 T-cell engager molecule 4 contains a CDH3 binder for the epitope D2C. The tested MSLN-CDH3 T-cell engager molecules 5 contains a CDH3 binder of for epitope D3A.

### Legend for MSLN Epitope Cluster Analysis:

[0774] MSLN-CDH3 T-cell engager molecule 1: MS 01-G11 CC×6H10.09×(G4S)3×scFc×(G4S)3×CH3 005-D5 CC×6H10.09

[0775] MSLN-CDH3 T-cell engager molecule 2: MS R4L CC×I2C CC (44/100)×(G4S)3×scFc×(G4S)3×CH3 R164L CC×I2C CC (44/100)

[0776] Positive control molecule 1: MS 5-F11×I2C scFc6

[0777] Positive control molecule 2: CH3 G8A 6-B12×I2C0-scFc

[0778] Negative control molecule 1: EGFRVIII×12C0×scFc ID:

### Results:

TABLE 48
EC50 values in pM and gaps of double positive human target
CHO cells versus single positive human target cells

| | | | EC50 CHO | | |
|---|---|---|---|---|---|
| | EC50 CHO hu | | hu CDH3 (+) | | EC50 CHO |
| | MSLN (+) | | & MSLN (+) | | hu CDH3 (+) |
| | [pM] | fold gap | [pM] | fold gap | [pM] |
| MSLN-CDH3 T-cell | 2.05 | 822 | 0.002 | 779 | 1.9 |
| engager molecule 1 | | | | | |
| MSLN-CDH3 T-cell | 2.53 | 70 | 0.036 | 139 | 5.8 |
| engager molecule 2 | | | | | |

[0780] The tested MSLN-CDH3 T-cell engager molecule 1 and 2 showed increased activity (lower EC50 values) on human MSLN and CDH3 double positive CHO cells compared to respective human target single positive CHO cells. The MSLN-CDH3 T-cell engager molecule 1 showed EC50 selectivity gaps greater 100-fold (on both sites) on double positive target cells versus single positive target cells. (FIG. 24) and (Table 48). The tested MSLN-CDH3 T-cell engager molecule 2 showed EC50 selectivity gaps lower 100-fold (on one site) on double positive target cells versus single positive target cells (FIG. 24) and (Table 48). The tested MSLN-CDH3 T-cell engager molecules 1 contains a MSLN binder for the epitope E1. The tested MSLN-CDH3 T-cell engager molecule 2 contains a MSLN binder for the epitope E2/E3. While molecule 2 shows good selectivity, molecule 1 is preferred.

### Example 22: Epitope Clustering of Ta Cell Engager with Chimeric Human/Mouse CDH3 Proteins

### Construct Generation

[0781] The human CDH3 protein extracellular region was divided into five parts: (1) domain 1, designated D1, (2) domain 2, designated D2, (3) domain 3, designated D3, (4) domain 4, designated D4 and (5) domain 5, designated D5. The epitope regions D1, D2, D3, D4 and D5 were further divided into three subparts, designated DIA, D1B, DIC, D2A, D2B, D2C, D3A, D3B, D3C, D4A, D4B, D4C, D5A, DSB and D5C.

TABLE 50
D2B, D2C, D3A and D4B have the following
amino acid sequence and positions (aa)
of the human CDH3 protein:

| Human | | | Amino acid |
|---|---|---|---|
| CDH3 | | Amino | sequence of |
| epitope | | acid | CDH3 epitope |
| cluster | species | position | cluster |
| D2B | human | aa 253-290 | VAYSIHSQEPKDPHD |
| | | | LMFTIHRSTGTISVI |
| | | | SSGLDREK |
| D2C | human | aa 291-327 | VPEYTLTIQATDMDG |
| | | | DGSTTTAVAVVEILD |
| | | | ANDNAPM |
| D3A | human | aa 328-363 | FDPQKYEAHVPENAV |
| | | | GHEVQRLTVTDLDAP |
| | | | NSPAWR |
| D4B | human | aa 476-511 | YRILRDPAGWLAMDP |
| | | | DSGQVTAVGTLDRED |
| | | | EQFVRN |

[0782] The human/mouse chimeric proteins were generated by replacing domains D1, D2, D3, D4, D5 or the respective subparts of the human CDH3 protein with the corresponding regions from mouse CDH3 protein.

[0783] The extracellular domain of mouse CDH3 and all chimeric human/mouse CDH3 constructs are fused to the transmembrane and cytoplasmic domain of EpCAM what is of no significance for the assay described here and is designated xEpC hereafter. The protein sequence of each of the constructs described above is depicted in FIG. 25. Deoxyribonucleic acid (DNA) sequences encoding either full-length human CDH3, mouse CDH3×EpC protein or human/mouse chimeric CDH3×EpC proteins were each cloned into a pEFdhfr vector and stably transfected into CHO dihydrofolate reductase-negative (DHFR−) cells. The aforementioned method can be applied with respect to any antigen-binding molecule binding CDH3 of the invention.

### Transfection

[0784] CHO DHFR− cells were transfected according to standard protocols with DNA encoding either the human CDH3 protein, the mouse CDH3×EpC protein or chimeric human/mouse CDH3×EpC proteins. Cells were grown in RPMI Medium with supplements for 24 hours. Selection of adherent-growing cells expressing human CDH3, mouse CDH3×EpC or chimeric human/mouse CDH3×EpC protein by nucleoside deprivation was done after 24 hours and cells were cultured in HyClone Medium with Pen/Strep at 37° in a humidified incubator.

### Flow Cytometry

[0785] To verify expression of the human CDH3 protein or chimeric human/mouse CDH3×EpC proteins on stably transfected CHO, cells were incubated with 5 μg/mL of an anti-human CDH3 antibody (R&D Systems, clone 104805) and 1:100 dilution of PE-labeled anti mouse Fcy secondary antibody (Jackson 115-116-071). To verify expression of the mouse CDH3×EpC protein on stably transfected CHO, cells were incubated with a periplasmic extract of the mouse cross reactive anti-human CDH3 scFv G7 (diluted 1:6 with PBS) and 1:50 dilution of a PE-labeled anti FLAG antibody (clone L5; BioLegend 637310). To evaluate binding of T cell engager SEQ ID NO: 434 to proteins expressed on the transfected cells, cells were incubated with 5 μg/mL of the T-cell engager SEQ ID NO: 434. Binding of the T cell engager SEQ ID NO: 434 was detected using a 1:50 dilution of a PE-labeled anti-human Fcy antibody. All antibodies were diluted in PBS with Calcium (Gibco 14040-117) and 2% FBS and all incubations were performed at 4° C. for 30 minutes. Washes were done using PBS with Calcium (Gibco 14040-117) and 2% FBS and the final suspension buffer prior to FACS analysis was also PBS with Calcium (Gibco 14040-117) and 2% FBS. Antibody binding was detected using a BD FACSCanto® II flow cytometer. Changes in mean fluorescence were analyzed with BD FACSDiva®, v8.1, ForeCyt® and FlowJo®.

### Analysis

[0786] Loss of binding to the various human/mouse chimeric CDH3 proteins was reflected as a decrease in signal detected by flow cytometry.

### Results

[0787] FIG. 25 depicts alignments of protein sequences of human CDH3 and mouse CDH3×EpC with colored epitope sections. As generically applicable with respect to the present invention, the extracellular domain 1 of CDH3 protein was designated D1, the following domains 2, 3, 4 and 5 were designated D2, D3, D4 and D5. For more refined epitope clustering, the extracellular domains D1, D2, D3, D4 and D5 were further divided into the subparts A, B, and C. For the epitope clustering, chimeric human/mouse CDH3 proteins were generated in which regions of human CDH3 protein were replaced with the corresponding regions from mouse CDH3 protein. Because T cell engager SEQ ID NO: 434 and anti-human CDH3 antibody do not bind the mouse CDH3 protein (FIG. 26), the binding epitope region can be identified by systematically replacing sections of the human protein with the mouse protein (human/mouse CDH3 chimeras) and determining which chimera is no longer recognized by the T cell engager SEQ ID NO: 434. Human CDH3, mouse CDH3×EpC and chimeric human/mouse CDH3×EpC proteins were stably expressed in CHO cells and binding of T Cell engager SEQ ID NO: 434, anti-human CDH3 antibody and mouse cross reactive anti human CDH3 scFv G7 to surface-expressed proteins was assessed by flow cytometry (FIG. 26).

[0788] T cell engager SEQ ID NO: 434 bound to cells expressing full-length human CDH3 protein, indicating it recognized the human extracellular domain. T cell engager SEQ ID NO: 434 did not bind to cells expressing mouse CDH3 protein, indicating it did not recognize the mouse extracellular domain. When binding to the domain-swapped proteins was evaluated, T cell engager SEQ ID NO: 434 showed binding to all human/mouse chimeric CDH3 proteins except D4 and D4B. If the human D4 or D4B domain was replaced with the mouse D4 or D4B domain respectively, SEQ ID NO: 434 did not recognize the chimeric protein. Binding of SEQ ID NO: 434 was not affected by exchange of D1, D2, D3, D5 or their respective subparts A, B or C. In conclusion, T cell engager SEQ ID NO: 434 shows a loss of binding to the epitope cluster D4B.

### Example 23

[0789] Epitope clustering of T cell engager SEQ ID NO: 434 and SEQ ID NO: 251 with chimeric human/mouse MSLN proteins

### Construct Generation

[0790] The mature human MSLN protein extracellular region was divided into six parts (designated hereafter epitope section): (1) epitope section 1 designated E1, (2) epitope section 2, designated E2, (3) epitope section 3, designated E3, (4) epitope section 4, designated E4, (5) epitope section 5, designated E5 and (6) epitope section 6, designated E6.

TABLE 51
E1, E2, E3, E4 and E5 have the following
amino acid sequence and positions (aa)
of the human MSLN protein:

| Human | | | amino acid |
|---|---|---|---|
| MSLN | | amino | sequence of |
| epitope | | acid | MSLN epitope |
| cluster | species | position | cluster |
| E1 | human | aa 296- | EVEKTACPSGKKAR |
| | | 346 | EIDESLIFYKKWEL |
| | | | EACVDAALLATQMD |
| | | | RVNAIPFTY |
| E2 | human | aa 347- | EQLDVLKHKLDELY |
| | | 384 | PQGYPESVIQHLGY |
| | | | LFLKMSPEDI |
| E3 | human | aa 385- | RKWNVTSLETLKAL |
| | | 453 | LEVNKGHEMSPQVA |
| | | | TLIDRFVKGRGQLD |
| | | | KDTLDTLTAFYPGY |
| | | | LCSLSPEELSSVP |
| E4 | human | aa 454- | PSSIWAVRPQDLDT |
| | | 501 | CDPRQLDVLYPKAR |
| | | | LAFQNMNGSEYFVK |
| | | | IQSFLG |
| E5 | human | aa 502- | GAPTEDLKALSQQN |
| | | 545 | VSMDLATFMKLRTD |
| | | | AVLPLTVAEVQKLL |
| | | | GP |

[0791] The human/mouse chimeric proteins were generated by replacing epitope sections E1, E2, E3, E4, E5 or E6 of the human MSLN protein with the corresponding region from mouse MSLN protein. The protein sequence of each of the constructs described above is depicted in FIG. 1. Deoxyribonucleic acid (DNA) sequences encoding either full-length human, mouse or human/mouse chimeric MSLN proteins were each cloned into a pEFdhfr vector and stably transfected into CHO dihydrofolate reductase-negative (DHFR−) cells.

### Transfection

[0792] CHO DHFR− cells were transfected according to standard protocols with DNA encoding either the full-length human MSLN protein, the full-length mouse MSLN protein or chimeric human/mouse MSLN proteins. Cells were grown in RPMI Medium with supplements for 24 hours. Selection of adherent-growing cells expressing human MSLN, mouse MSLN or chimeric human/mouse MSLN proteins by nucleoside deprivation was done after 24 hours and cells were cultured in HyClone Medium with Pen/Strep at 37° in a humidified incubator.

### Flow Cytometry

[0793] To verify expression of the human MSLN protein or the chimeric human/mouse MSLN proteins on stably transfected CHO, cells were incubated with 5 μg/mL of an anti-human MSLN antibody (Thermo Fischer MA1-26527, clone 1) and 1:100 dilution of PE-labeled anti mouse Fcy secondary antibody (Jackson 115-116-071). To verify expression of the mouse MSLN protein on stably transfected CHO, cells were incubated with 5 μg/mL of the mouse cross reactive anti-human MSLN BITE R4T and a 1:50 dilution of a PE-labeled anti-human Fcy antibody (Jackson 109-116-098). To evaluate binding of T cell engager SEQ ID NO: 434 and SEQ ID NO: 251 to proteins expressed on the transfected cells, cells were incubated with 5 μg/mL of the T-cell engager SEQ ID NO: 434 or SEQ ID NO: 251. Binding of the T cell engager SEQ ID NO: 434 and SEQ ID NO: 251 was detected using a 1:50 dilution of a PE-labeled anti-human Fcy antibody. All antibodies were diluted in PBS with 2% FBS and all incubations were performed at 4° C. for 30 minutes. Washes were done using PBS with 2% FBS and the final suspension buffer prior to FACS analysis was also PBS with 2% FBS.

[0794] Antibody binding was detected using a BD FACSCanto® II flow cytometer. Changes in mean fluorescence were analyzed with BD FACSDiva®, v8.1, ForeCyt® and FlowJo®.

### Analysis

[0795] Loss of the binding to the various human/mouse chimeric MSLN proteins was reflected as a decrease in signal detected by flow cytometry.

### Results

[0796] FIG. 27 depicts alignments of protein sequences of human MSLN and mouse MSLN with colored epitope sections. The extracellular domain of the MSLN protein was divided into six parts designated epitope sections. As generally applicable in the context of the present invention, epitope section 1 of the MSLN protein was designated E1, epitope sections 2, 3, 4, 5 and 6 were designated E2, E3, E4, E5 and E6 respectively. For the epitope clustering, chimeric human/mouse MSLN proteins were generated in which regions of human MSLN protein were replaced with the corresponding regions from mouse MSLN protein. Because T cell engager SEQ ID NO: 434 and SEQ ID NO: 251 do not bind the mouse MSLN protein (FIG. 28), the binding epitope region can be identified by systematically replacing sections of the human protein with the mouse protein (human/mouse MSLN chimeras) and determining which chimera is no longer recognized by the T cell engager SEQ ID NO: 434 and SEQ ID NO: 251. Human MSLN, mouse MSLN and chimeric human/mouse MSLN proteins were stably expressed in CHO cells and binding of T Cell engager SEQ ID NO: 434 and SEQ ID NO: 251 and anti-human MSLN antibody to surface-expressed proteins was assessed by flow cytometry (FIG. 28). T cell engager SEQ ID NO: 434 and SEQ ID NO: 251 bound to cells expressing full length human MSLN protein, indicating it recognized the human extracellular domain. T cell engager SEQ ID NO: 434 and SEQ ID NO: 251 did not bind to cells expressing mouse MSLN protein, indicating it did not recognize the mouse extracellular domain. When binding to the domain-swapped proteins was evaluated, T cell engager SEQ ID NO: 434 and SEQ ID NO: 251 showed binding to human/mouse chimeric MSLN proteins E2, E3, E4, E5 and E6. If the human E1 epitope section of MSLN was replaced with the respective mouse E1 epitope section, SEQ ID NO: 434 and SEQ ID NO: 251 did not recognize the chimeric protein. Binding of SEQ ID NO: 434 and SEQ ID NO: 251 was not affected by exchange of the human sequence of E2, E3, E4, E5 or E6 to the respective mouse sequence.

[0797] In CONCLUSION, representative T-cell engager of the invention SEQ ID NO: 434 and SEQ ID NO: 251 shows a loss of binding to the MSLN epitope cluster E1.

TABLE 53
Sequence Table: Linkers, which may be indicated in the
description as “G4”, “(G4S)n”, “(G4Q)n” or the like are
not necessarily indicated in the table with such linked
binding domain in order to maintain readability. The
absence of such linker indication does not mean that
the molecule in the table differs from the correspond-
ing molecule in the description under a denomination
which comprises the linker information. “CC” indicates
disulfide bonds within a binding domain, “I2L”, “I2C”,
“I2M” and “2M2” indicate CD3 binding domains. Target
binding domains may be abbreviated such as “CH3” for
“CDH3”, “CL1” for “CLL1”, “FL” for “FLT3” and “MS” for
“MSLN”.

| SEQ | | | | |
|---|---|---|---|---|
| ID | | | | |
| NO: | Designation | Source | | Sequence |
| 1. | (G4Q)3 - Linker | artificial | Aa | GGGGQGGGGQGGGGQ |
| 2. | (G4S)10 - Linker | artificial | aa | GGGGSGGGGSGGGGSGGGGSGGGGSGGGGSG |
| | | | | GGGSGGGGSGGGGSGGGGS |
| 3. | (G4S)3 - Linker | artificial | aa | GGGGSGGGGSGGGGS |
| 4. | G(EAAAK)10 - | artificial | aa | GEAAAKEAAAKEAAAKEAAAKEAAAKEAAA |
| | Linker | | | KEAAAKEAAAKEAAAKEAAAK |
| 5. | G4 - Linker | artificial | aa | GGGG |
| 6. | G4Q - Linker | artificial | aa | GGGGQ |
| 7. | G4S - Linker, | artificial | aa | GGGGS |
| | spacer control | | | |
| 8. | S(G4S)10 - | artificial | aa | SGGGGSGGGGSGGGGSGGGGSGGGGSGGGGS |
| | Linker | | | GGGGSGGGGSGGGGSGGGGS |
| 9. | S(G4S)3 - Linker | artificial | aa | SGGGGSGGGGSGGGGS |
| 10. | SG(EAAAK)10 - | artificial | aa | SGEAAAKEAAAKEAAAKEAAAKEAAAKEAA |
| | Linker | | | AKEAAAKEAAAKEAAAKEAAAK |
| 11. | SG4Q - Linker | artificial | aa | SGGGGQ |
| 12. | SG4S - Linker | artificial | aa | SGGGGS |
| 13. | (EAAAK)10 - | artificial | aa | EAAAKEAAAKEAAAKEAAAKEAAAKEAAAK |
| | Spacer | | | EAAAKEAAAKEAAAKEAAAK |
| 14. | (G4S)10 - Spacer | artificial | aa | GGGGSGGGGSGGGGSGGGGSGGGGSGGGGSG |
| | control | | | GGGSGGGGSGGGGSGGGGS |
| 15. | Human Serum | artificial | Aa | DAHKSEVAHRFKDLGEENFKALVLIAFAQYLQ |
| | Albumin (HSA) - | | | QCPFEDHVKLVNEVTEFAKTCVADESAENCDK |
| | Spacer | | | SLHTLFGDKLCTVATLRETYGEMADCCAKQEP |
| | | | | ERNECFLQHKDDNPNLPRLVRPEVDVMCTAFH |
| | | | | DNEETFLKKYLYEIARRHPYFYAPELLFFAKRY |
| | | | | KAAFTECCQAADKAACLLPKLDELRDEGKASS |
| | | | | AKQRLKCASLQKFGERAFKAWAVARLSQRFP |
| | | | | KAEFAEVSKLVTDLTKVHTECCHGDLLECADD |
| | | | | RADLAKYICENQDSISSKLKECCEKPLLEKSHCI |
| | | | | AEVENDEMPADLPSLAADFVESKDVCKNYAE |
| | | | | AKDVFLGMFLYEYARRHPDYSVVLLLRLAKT |
| | | | | YETTLEKCCAAADPHECYAKVFDEFKPLVEEP |
| | | | | QNLIKQNCELFEQLGEYKFQNALLVRYTKKVP |
| | | | | QVSTPTLVEVSRNLGKVGSKCCKHPEAKRMPC |
| | | | | AEDYLSVVLNQLCVLHEKTPVSDRVTKCCTES |
| | | | | LVNRRPCFSALEVDETYVPKEFNAETFTFHADI |
| | | | | CTLSEKERQIKKQTALVELVKHKPKATKEQLK |
| | | | | AVMDDFAAFVEKCCKADDKETCFAEEGKKLV |
| | | | | AASQAALGL |
| 16. | PD1 (ECD 25- | artificial | Aa | LDSPDRPWNPPTFSPALLVVTEGDNATFTCSFS |
| | 167) - Spacer | | | NTSESFVLNWYRMSPSNQTDKLAAFPEDRSQP |
| | | | | GQDCRFRVTQLPNGRDFHMSVVRARRNDSGT |
| | | | | YLCGAISLAPKAQIKESLRAELRVTERRAEVPT |
| | | | | AHPSPSPRPAGQFQ |
| 17. | Fc monomer-1 - | artificial | Aa | DKTHTCPPCPAPELLGGPSVFLFPPKPKDTLMIS |
| | c/+g | | | RTPEVTCVVVDVSHEDPEVKFNWYVDGVEVH |
| | | | | NAKTKPCEEQYGSTYRCVSVLTVLHQDWLNG |
| | | | | KEYKCKVSNKALPAPIEKTISKAKGQPREPQVY |
| | | | | TLPPSREEMTKNQVSLTCLVKGFYPSDIAVEWE |
| | | | | SNGQPENNYKTTPPVLDSDGSFFLYSKLTVDKS |
| | | | | RWQQGNVFSCSVMHEALHNHYTQKSLSLSPG |
| | | | | K |
| 18. | Fc monomer-2 - | artificial | Aa | DKTHTCPPCPAPELLGGPSVFLFPPKPKDTLMIS |
| | c/+g/delGK | | | RTPEVTCVVVDVSHEDPEVKFNWYVDGVEVH |
| | | | | NAKTKPCEEQYGSTYRCVSVLTVLHQDWLNG |
| | | | | KEYKCKVSNKALPAPIEKTISKAKGQPREPQVY |
| | | | | TLPPSREEMTKNQVSLTCLVKGFYPSDIAVEWE |
| | | | | SNGQPENNYKTTPPVLDSDGSFFLYSKLTVDKS |
| | | | | RWQQGNVFSCSVMHEALHNHYTQKSLSLSP |
| 19. | Fc monomer-3- | artificial | Aa | DKTHTCPPCPAPELLGGPSVFLFPPKPKDTLMIS |
| | c/+g | | | RTPEVTCVVVDVSHEDPEVKFNWYVDGVEVH |
| | | | | NAKTKPREEQYNSTYRVVSVLTVLHQDWLNG |
| | | | | KEYKCKVSNKALPAPIEKTISKAKGQPREPQVY |
| | | | | TLPPSREEMTKNQVSLTCLVKGFYPSDIAVEWE |
| | | | | SNGQPENNYKTTPPVLDSDGSFFLYSKLTVDKS |
| | | | | RWQQGNVFSCSVMHEALHNHYTQKSLSLSPG |
| | | | | K |
| 20. | Fc monomer-4- | artificial | Aa | DKTHTCPPCPAPELLGGPSVFLFPPKPKDTLMIS |
| | c/+g/delGK | | | RTPEVTCVVVDVSHEDPEVKFNWYVDGVEVH |
| | | | | NAKTKPREEQYNSTYRVVSVLTVLHQDWLNG |
| | | | | KEYKCKVSNKALPAPIEKTISKAKGQPREPQVY |
| | | | | TLPPSREEMTKNQVSLTCLVKGFYPSDIAVEWE |
| | | | | SNGQPENNYKTTPPVLDSDGSFFLYSKLTVDKS |
| | | | | RWQQGNVFSCSVMHEALHNHYTQKSLSLSP |
| 21. | Fc monomer-5- | artificial | Aa | DKTHTCPPCPAPELLGGPSVFLFPPKPKDTLMIS |
| | c/+g | | | RTPEVTCVVVDVSHEDPEVKFNWYVDGVEVH |
| | | | | NAKTKPREEQYGSTYRVVSVLTVLHQDWLNG |
| | | | | KEYKCKVSNKALPAPIEKTISKAKGQPREPQVY |
| | | | | TLPPSREEMTKNQVSLTCLVKGFYPSDIAVEWE |
| | | | | SNGQPENNYKTTPPVLDSDGSFFLYSKLTVDKS |
| | | | | RWQQGNVFSCSVMHEALHNHYTQKSLSLSPG |
| | | | | K |
| 22. | Fc monomer-6- | artificial | Aa | DKTHTCPPCPAPELLGGPSVFLFPPKPKDTLMIS |
| | c/+g/delGK | | | RTPEVTCVVVDVSHEDPEVKFNWYVDGVEVH |
| | | | | NAKTKPREEQYGSTYRVVSVLTVLHQDWLNG |
| | | | | KEYKCKVSNKALPAPIEKTISKAKGQPREPQVY |
| | | | | TLPPSREEMTKNQVSLTCLVKGFYPSDIAVEWE |
| | | | | SNGQPENNYKTTPPVLDSDGSFFLYSKLTVDKS |
| | | | | RWQQGNVFSCSVMHEALHNHYTQKSLSLSP |
| 23. | Fc monomer-7- | artificial | Aa | DKTHTCPPCPAPELLGGPSVFLFPPKPKDTLMIS |
| | c/+g | | | RTPEVTCVVVDVSHEDPEVKFNWYVDGVEVH |
| | | | | NAKTKPCEEQYNSTYRCVSVLTVLHQDWLNG |
| | | | | KEYKCKVSNKALPAPIEKTISKAKGQPREPQVY |
| | | | | TLPPSREEMTKNQVSLTCLVKGFYPSDIAVEWE |
| | | | | SNGQPENNYKTTPPVLDSDGSFFLYSKLTVDKS |
| | | | | RWQQGNVFSCSVMHEALHNHYTQKSLSLSPG |
| | | | | K |
| 24. | Fc monomer-8- | artificial | aa | DKTHTCPPCPAPELLGGPSVFLFPPKPKDTLMIS |
| | c/+g/delGK | | | RTPEVTCVVVDVSHEDPEVKFNWYVDGVEVH |
| | | | | NAKTKPCEEQYNSTYRCVSVLTVLHQDWLNG |
| | | | | KEYKCKVSNKALPAPIEKTISKAKGQPREPQVY |
| | | | | TLPPSREEMTKNQVSLTCLVKGFYPSDIAVEWE |
| | | | | SNGQPENNYKTTPPVLDSDGSFFLYSKLTVDKS |
| | | | | RWQQGNVFSCSVMHEALHNHYTQKSLSLSP |
| 25. | scFc - Spacer | artificial | aa | DKTHTCPPCPAPELLGGPSVFLFPPKPKDTLMIS |
| | | | | RTPEVTCVVVDVSHEDPEVKFNWYVDGVEVH |
| | | | | NAKTKPCEEQYGSTYRCVSVLTVLHQDWLNG |
| | | | | KEYKCKVSNKALPAPIEKTISKAKGQPREPQVY |
| | | | | TLPPSREEMTKNQVSLTCLVKGFYPSDIAVEWE |
| | | | | SNGQPENNYKTTPPVLDSDGSFFLYSKLTVDKS |
| | | | | RWQQGNVFSCSVMHEALHNHYTQKSLSLSPG |
| | | | | KGGGGSGGGGSGGGGSGGGGSGGGGSGGGGS |
| | | | | DKTHTCPPCPAPELLGGPSVFLFPPKPKDTLMIS |
| | | | | RTPEVTCVVVDVSHEDPEVKFNWYVDGVEVH |
| | | | | NAKTKPCEEQYGSTYRCVSVLTVLHQDWLNG |
| | | | | KEYKCKVSNKALPAPIEKTISKAKGQPREPQVY |
| | | | | TLPPSREEMTKNQVSLTCLVKGFYPSDIAVEWE |
| | | | | SNGQPENNYKTTPPVLDSDGSFFLYSKLTVDKS |
| | | | | RWQQGNVFSCSVMHEALHNHYTQKSLSLSPG |
| | | | | K |
| 26. | scFc-2 Spacer | artificial | aa | DKTHTCPPCPAPELLGGPSVFLFPPKPKDTLMIS |
| | | | | RTPEVTCVVVDVSHEDPEVKFNWYVDGVEVH |
| | | | | NAKTKPCEEQYGSTYRCVSVLTVLHQDWLNG |
| | | | | KEYKCKVSNKALPAPIEKTISKAKGQPREPQVY |
| | | | | TLPPSREEMTKNQVSLTCLVKGFYPSDIAVEWE |
| | | | | SNGQPENNYKTTPPVLDSDGSFFLYSKLTVDKS |
| | | | | RWQQGNVFSCSVMHEALHNHYTQKSLSLSPG |
| | | | | GGGSGGGGSGGGGSGGGGSGGGGSGGGGSDK |
| | | | | THTCPPCPAPELLGGPSVFLFPPKPKDTLMISRT |
| | | | | PEVTCVVVDVSHEDPEVKFNWYVDGVEVHNA |
| | | | | KTKPCEEQYGSTYRCVSVLTVLHQDWLNGKE |
| | | | | YKCKVSNKALPAPIEKTISKAKGQPREPQVYTL |
| | | | | PPSREEMTKNQVSLTCLVKGFYPSDIAVEWES |
| | | | | NGQPENNYKTTPPVLDSDGSFFLYSKLTVDKS |
| | | | | RWQQGNVFSCSVMHEALHNHYTQKSLSLSP |
| 27. | scFc-3 Spacer | artificial | aa | DKTHTCPPCPAPELLGGPSVFLFPPKPKDTLMIS |
| | | | | RTPEVTCVVVDVSHEDPEVKFNWYVDGVEVH |
| | | | | NAKTKPREEQYNSTYRVVSVLTVLHQDWLNG |
| | | | | KEYKCKVSNKALPAPIEKTISKAKGQPREPQVY |
| | | | | TLPPSREEMTKNQVSLTCLVKGFYPSDIAVEWE |
| | | | | SNGQPENNYKTTPPVLDSDGSFFLYSKLTVDKS |
| | | | | RWQQGNVFSCSVMHEALHNHYTQKSLSLSPG |
| | | | | KGGGGSGGGGSGGGGSGGGGSGGGGSGGGGS |
| | | | | DKTHTCPPCPAPELLGGPSVFLFPPKPKDTLMIS |
| | | | | RTPEVTCVVVDVSHEDPEVKFNWYVDGVEVH |
| | | | | NAKTKPREEQYNSTYRVVSVLTVLHQDWLNG |
| | | | | KEYKCKVSNKALPAPIEKTISKAKGQPREPQVY |
| | | | | TLPPSREEMTKNQVSLTCLVKGFYPSDIAVEWE |
| | | | | SNGQPENNYKTTPPVLDSDGSFFLYSKLTVDKS |
| | | | | RWQQGNVFSCSVMHEALHNHYTQKSLSLSPG |
| | | | | K |
| 28. | scFc-4 Spacer | artificial | aa | DKTHTCPPCPAPELLGGPSVFLFPPKPKDTLMIS |
| | | | | RTPEVTCVVVDVSHEDPEVKFNWYVDGVEVH |
| | | | | NAKTKPREEQYNSTYRVVSVLTVLHQDWLNG |
| | | | | KEYKCKVSNKALPAPIEKTISKAKGQPREPQVY |
| | | | | TLPPSREEMTKNQVSLTCLVKGFYPSDIAVEWE |
| | | | | SNGQPENNYKTTPPVLDSDGSFFLYSKLTVDKS |
| | | | | RWQQGNVFSCSVMHEALHNHYTQKSLSLSPG |
| | | | | GGGSGGGGSGGGGSGGGGSGGGGSGGGGSDK |
| | | | | THTCPPCPAPELLGGPSVFLFPPKPKDTLMISRT |
| | | | | PEVTCVVVDVSHEDPEVKFNWYVDGVEVHNA |
| | | | | KTKPREEQYNSTYRVVSVLTVLHQDWLNGKE |
| | | | | YKCKVSNKALPAPIEKTISKAKGQPREPQVYTL |
| | | | | PPSREEMTKNQVSLTCLVKGFYPSDIAVEWES |
| | | | | NGQPENNYKTTPPVLDSDGSFFLYSKLTVDKS |
| | | | | RWQQGNVFSCSVMHEALHNHYTQKSLSLSP |
| 29. | scFc-5 Spacer | artificial | aa | DKTHTCPPCPAPELLGGPSVFLFPPKPKDTLMIS |
| | | | | RTPEVTCVVVDVSHEDPEVKFNWYVDGVEVH |
| | | | | NAKTKPREEQYGSTYRVVSVLTVLHQDWLNG |
| | | | | KEYKCKVSNKALPAPIEKTISKAKGQPREPQVY |
| | | | | TLPPSREEMTKNQVSLTCLVKGFYPSDIAVEWE |
| | | | | SNGQPENNYKTTPPVLDSDGSFFLYSKLTVDKS |
| | | | | RWQQGNVFSCSVMHEALHNHYTQKSLSLSPG |
| | | | | KGGGGSGGGGSGGGGSGGGGSGGGGSGGGGS |
| | | | | DKTHTCPPCPAPELLGGPSVFLFPPKPKDTLMIS |
| | | | | RTPEVTCVVVDVSHEDPEVKFNWYVDGVEVH |
| | | | | NAKTKPREEQYGSTYRVVSVLTVLHQDWLNG |
| | | | | KEYKCKVSNKALPAPIEKTISKAKGQPREPQVY |
| | | | | TLPPSREEMTKNQVSLTCLVKGFYPSDIAVEWE |
| | | | | SNGQPENNYKTTPPVLDSDGSFFLYSKLTVDKS |
| | | | | RWQQGNVFSCSVMHEALHNHYTQKSLSLSPG |
| | | | | K |
| 30. | scFc-6 Spacer | artificial | aa | DKTHTCPPCPAPELLGGPSVFLFPPKPKDTLMIS |
| | | | | RTPEVTCVVVDVSHEDPEVKFNWYVDGVEVH |
| | | | | NAKTKPREEQYGSTYRVVSVLTVLHQDWLNG |
| | | | | KEYKCKVSNKALPAPIEKTISKAKGQPREPQVY |
| | | | | TLPPSREEMTKNQVSLTCLVKGFYPSDIAVEWE |
| | | | | SNGQPENNYKTTPPVLDSDGSFFLYSKLTVDKS |
| | | | | RWQQGNVFSCSVMHEALHNHYTQKSLSLSPG |
| | | | | GGGSGGGGSGGGGSGGGGSGGGGSGGGGSDK |
| | | | | THTCPPCPAPELLGGPSVFLFPPKPKDTLMISRT |
| | | | | PEVTCVVVDVSHEDPEVKFNWYVDGVEVHNA |
| | | | | KTKPREEQYGSTYRVVSVLTVLHQDWLNGKE |
| | | | | YKCKVSNKALPAPIEKTISKAKGQPREPQVYTL |
| | | | | PPSREEMTKNQVSLTCLVKGFYPSDIAVEWES |
| | | | | NGQPENNYKTTPPVLDSDGSFFLYSKLTVDKS |
| | | | | RWQQGNVFSCSVMHEALHNHYTQKSLSLSP |
| 31. | scFc-7 Spacer | artificial | aa | DKTHTCPPCPAPELLGGPSVFLFPPKPKDTLMIS |
| | | | | RTPEVTCVVVDVSHEDPEVKFNWYVDGVEVH |
| | | | | NAKTKPCEEQYNSTYRCVSVLTVLHQDWLNG |
| | | | | KEYKCKVSNKALPAPIEKTISKAKGQPREPQVY |
| | | | | TLPPSREEMTKNQVSLTCLVKGFYPSDIAVEWE |
| | | | | SNGQPENNYKTTPPVLDSDGSFFLYSKLTVDKS |
| | | | | RWQQGNVFSCSVMHEALHNHYTQKSLSLSPG |
| | | | | KGGGGSGGGGSGGGGSGGGGSGGGGSGGGGS |
| | | | | DKTHTCPPCPAPELLGGPSVFLFPPKPKDTLMIS |
| | | | | RTPEVTCVVVDVSHEDPEVKFNWYVDGVEVH |
| | | | | NAKTKPCEEQYNSTYRCVSVLTVLHQDWLNG |
| | | | | KEYKCKVSNKALPAPIEKTISKAKGQPREPQVY |
| | | | | TLPPSREEMTKNQVSLTCLVKGFYPSDIAVEWE |
| | | | | SNGQPENNYKTTPPVLDSDGSFFLYSKLTVDKS |
| | | | | RWQQGNVFSCSVMHEALHNHYTQKSLSLSPG |
| | | | | K |
| 32. | scFc-8 Spacer | artificial | Aa | DKTHTCPPCPAPELLGGPSVFLFPPKPKDTLMIS |
| | | | | RTPEVTCVVVDVSHEDPEVKFNWYVDGVEVH |
| | | | | NAKTKPCEEQYNSTYRCVSVLTVLHQDWLNG |
| | | | | KEYKCKVSNKALPAPIEKTISKAKGQPREPQVY |
| | | | | TLPPSREEMTKNQVSLTCLVKGFYPSDIAVEWE |
| | | | | SNGQPENNYKTTPPVLDSDGSFFLYSKLTVDKS |
| | | | | RWQQGNVFSCSVMHEALHNHYTQKSLSLSPG |
| | | | | GGGSGGGGSGGGGSGGGGSGGGGSGGGGSDK |
| | | | | THTCPPCPAPELLGGPSVFLFPPKPKDTLMISRT |
| | | | | PEVTCVVVDVSHEDPEVKFNWYVDGVEVHNA |
| | | | | KTKPCEEQYNSTYRCVSVLTVLHQDWLNGKE |
| | | | | YKCKVSNKALPAPIEKTISKAKGQPREPQVYTL |
| | | | | PPSREEMTKNQVSLTCLVKGFYPSDIAVEWES |
| | | | | NGQPENNYKTTPPVLDSDGSFFLYSKLTVDKS |
| | | | | RWQQGNVFSCSVMHEALHNHYTQKSLSLSP |
| 33. | scFc_mod_GQ_cli | artificial | Aa | CPPCPAPELLGGPSVFLFPPKPKDTLMISRTPEV |
| | ppingvariant - | | | TCVVVDVSHEEPEVKFNWYVDGVEVHNAKTK |
| | Spacer | | | PCEEQYGSTYRCVSVLTVLHQDWLNGKEYKC |
| | | | | KVSNKALPAPIEKTISKAKGQPREPQVYTLPPS |
| | | | | REEMTKNQVSLTCLVKGFYPSDIAVEWESNGQ |
| | | | | PENNYKTTPPVLDSDGSFFLYSKLTVDKSRWQ |
| | | | | QGNVFSCSVMHEALHNHYTQKSLSLSPGKGG |
| | | | | GGQGGGGQGGGGQGGGGQGGGGQGGGGQCP |
| | | | | PCPAPELLGGPSVFLFPPKPKDTLMISRTPEVTC |
| | | | | VVVDVSHEEPEVKFNWYVDGVEVHNAKTKPC |
| | | | | EEQYGSTYRCVSVLTVLHQDWLNGKEYKCKV |
| | | | | SNKALPAPIEKTISKAKGQPREPQVYTLPPSREE |
| | | | | MTKNQVSLTCLVKGFYPSDIAVEWESNGQPEN |
| | | | | NYKTTPPVLDSDGSFFLYSKLTVDKSRWQQGN |
| | | | | VFSCSVMHEALHNHYTQKSLSLSPGK |
| 34. | 2x scFc - double | artificial | Aa | DKTHTCPPCPAPELLGGPSVFLFPPKPKDTLMIS |
| | size Spacer | | | RTPEVTCVVVDVSHEDPEVKFNWYVDGVEVH |
| | | | | NAKTKPCEEQYGSTYRCVSVLTVLHQDWLNG |
| | | | | KEYKCKVSNKALPAPIEKTISKAKGQPREPQVY |
| | | | | TLPPSREEMTKNQVSLTCLVKGFYPSDIAVEWE |
| | | | | SNGQPENNYKTTPPVLDSDGSFFLYSKLTVDKS |
| | | | | RWQQGNVFSCSVMHEALHNHYTQKSLSLSPG |
| | | | | KGGGGSGGGGSGGGGSGGGGSGGGGSGGGGS |
| | | | | DKTHTCPPCPAPELLGGPSVFLFPPKPKDTLMIS |
| | | | | RTPEVTCVVVDVSHEDPEVKFNWYVDGVEVH |
| | | | | NAKTKPCEEQYGSTYRCVSVLTVLHQDWLNG |
| | | | | KEYKCKVSNKALPAPIEKTISKAKGQPREPQVY |
| | | | | TLPPSREEMTKNQVSLTCLVKGFYPSDIAVEWE |
| | | | | SNGQPENNYKTTPPVLDSDGSFFLYSKLTVDKS |
| | | | | RWQQGNVFSCSVMHEALHNHYTQKSLSLSPG |
| | | | | KDKTHTCPPCPAPELLGGPSVFLFPPKPKDTLM |
| | | | | ISRTPEVTCVVVDVSHEDPEVKFNWYVDGVEV |
| | | | | HNAKTKPCEEQYGSTYRCVSVLTVLHQDWLN |
| | | | | GKEYKCKVSNKALPAPIEKTISKAKGQPREPQV |
| | | | | YTLPPSREEMTKNQVSLTCLVKGFYPSDIAVE |
| | | | | WESNGQPENNYKTTPPVLDSDGSFFLYSKLTV |
| | | | | DKSRWQQGNVFSCSVMHEALHNHYTQKSLSL |
| | | | | SPGKGGGGSGGGGSGGGGSGGGGSGGGGSGG |
| | | | | GGSDKTHTCPPCPAPELLGGPSVFLFPPKPKDT |
| | | | | LMISRTPEVTCVVVDVSHEDPEVKFNWYVDG |
| | | | | VEVHNAKTKPCEEQYGSTYRCVSVLTVLHQD |
| | | | | WLNGKEYKCKVSNKALPAPIEKTISKAKGQPR |
| | | | | EPQVYTLPPSREEMTKNQVSLTCLVKGFYPSDI |
| | | | | AVEWESNGQPENNYKTTPPVLDSDGSFFLYSK |
| | | | | LTVDKSRWQQGNVFSCSVMHEALHNHYTQKS |
| | | | | LSLSPGK |
| 35. | heteroFc (A) - | artificial | Aa | DKTHTCPPCPAPELLGGPSVFLFPPKPKDTLMIS |
| | Spacer | | | RTPEVTCVVVDVSHEDPEVKFNWYVDGVEVH |
| | | | | NAKTKPCEEQYGSTYRCVSVLTVLHQDWLNG |
| | | | | KEYKCKVSNKALPAPIEKTISKAKGQPREPQVY |
| | | | | TLPPSREEMTKNQVSLTCLVKGFYPSDIAVEWE |
| | | | | SNGQPENNYDTTPPVLDSDGSFFLYSDLTVDKS |
| | | | | RWQQGNVFSCSVMHEALHNHYTQDSLSLSPG |
| | | | | K |
| 36. | heteroFc (B) - | artificial | Aa | DKTHTCPPCPAPELLGGPSVFLFPPKPKDTLMIS |
| | Spacer | | | RTPEVTCVVVDVSHEDPEVKFNWYVDGVEVH |
| | | | | NAKTKPCEEQYGSTYRCVSVLTVLHQDWLNG |
| | | | | KEYKCKVSNKALPAPIEKTISKAKGQPREPQVY |
| | | | | TLPPSRKEMTKNQVSLTCLVKGFYPSDIAVEW |
| | | | | ESNGQPENNYKTTPPVLKSDGSFFLYSKLTVDK |
| | | | | SRWQQGNVFSCSVMHEALHNHYTQKSLSLSP |
| | | | | GK |
| 37. | I2C - HCDR1 | artificial | Aa | KYAMN |
| 38. | I2C - HCDR2 | artificial | Aa | RIRSKYNNYATYYADSVKD |
| 39. | I2C - HCDR3 | artificial | Aa | HGNFGNSYISYWAY |
| 40. | I2C - LCDR1 | artificial | Aa | GSSTGAVTSGNYPN |
| 41. | I2C - LCDR2 | artificial | aa | GTKFLAP |
| 42. | I2C - LCDR3 | artificial | aa | VLWYSNRWV |
| 43. | I2C - VH | artificial | aa | EVQLVESGGGLVQPGGSLKLSCAASGFTFNKY |
| | | | | AMNWVRQAPGKGLEWVARIRSKYNNYATYY |
| | | | | ADSVKDRFTISRDDSKNTAYLQMNNLKTEDTA |
| | | | | VYYCVRHGNFGNSYISYWAYWGQGTLVTVSS |
| 44. | I2C - VL | artificial | aa | QTVVTQEPSLTVSPGGTVTLTCGSSTGAVTSGN |
| | | | | YPNWVQQKPGQAPRGLIGGTKFLAPGTPARFS |
| | | | | GSLLGGKAALTLSGVQPEDEAEYYCVLWYSN |
| | | | | RWVFGGGTKLTVL |
| 45. | I2C_44/100cc - | artificial | aa | KYAMN |
| | HCDR1 | | | |
| 46. | I2C_44/100cc - | artificial | aa | RIRSKYNNYATYYADSVKD |
| | HCDR2 | | | |
| 47. | I2C_44/100cc - | artificial | aa | HGNFGNSYISYWAY |
| | HCDR3 | | | |
| 48. | I2C_44/100cc - | artificial | aa | GSSTGAVTSGNYPN |
| | LCDR1 | | | |
| 49. | I2C_44/100cc - | artificial | Aa | GTKFLAP |
| | LCDR2 | | | |
| 50. | I2C_44/100cc - | artificial | Aa | VLWYSNRWV |
| | LCDR3 | | | |
| 51. | I2C_44/100cc - | artificial | Aa | EVQLVESGGGLVQPGGSLKLSCAASGFTFNKY |
| | VH | | | AMNWVRQAPGKCLEWVARIRSKYNNYATYY |
| | | | | ADSVKDRFTISRDDSKNTAYLQMNNLKTEDTA |
| | | | | VYYCVRHGNFGNSYISYWAYWGQGTLVTVSS |
| 52. | I2C_44/100cc - | artificial | Aa | QTVVTQEPSLTVSPGGTVTLTCGSSTGAVTSGN |
| | VL | | | YPNWVQQKPGQAPRGLIGGTKFLAPGTPARFS |
| | | | | GSLLGGKAALTLSGVQPEDEAEYYCVLWYSN |
| | | | | RWVFGCGTKLTVL |
| 53. | I2E - HCDR1 | artificial | Aa | KYAIN |
| 54. | I2E - HCDR2 | artificial | Aa | RIRSKYNNYATYYADAVKD |
| 55. | I2E - HCDR3 | artificial | Aa | AGNFGSSYISYWAY |
| 56. | I2E - LCDR1 | artificial | Aa | GSSTGAVTSGNYPN |
| 57. | I2E - LCDR2 | artificial | Aa | GTKFLAP |
| 58. | I2E - LCDR3 | artificial | aa | VLWYSNRWV |
| 59. | I2E - VH | artificial | aa | EVQLVESGGGLVQPGGSLKLSCAASGFTFNKY |
| | | | | AINWVRQAPGKGLEWVARIRSKYNNYATYYA |
| | | | | DAVKDRFTISRDDSKNTVYLQMNNLKTEDTA |
| | | | | VYYCARAGNFGSSYISYWAYWGQGTLVTVSS |
| 60. | I2E - VL | artificial | aa | QTVVTQEPSLTVSPGGTVTITCGSSTGAVTSGN |
| | | | | YPNWVQKKPGQAPRGLIGGTKFLAPGTPARFS |
| | | | | GSLSGGKAALTLSGVQPEDEAEYYCVLWYSN |
| | | | | RWVFGSGTKLTVL |
| 61. | I2L - HCDR1 | artificial | aa | KYAMN |
| 62. | I2L - HCDR2 | artificial | aa | RIRSKYNNYATYYADAVKD |
| 63. | I2L - HCDR3 | artificial | aa | AGNFGSSYISYFAY |
| 64. | I2L - LCDR1 | artificial | aa | GSSTGAVTSGNYPN |
| 65. | I2L - LCDR2 | artificial | aa | GTKFLAP |
| 66. | I2L - LCDR3 | artificial | Aa | VLYYSNRWV |
| 67. | I2L - VH | artificial | Aa | EVQLVESGGGLVQPGGSLKLSCAASGFTFNKY |
| | | | | AMNWVRQAPGKGMEWVARIRSKYNNYATYY |
| | | | | ADAVKDRFTISRDDSKNTLYLQMNNLKTEDTA |
| | | | | VYYCVRAGNFGSSYISYFAYWGQGTLVTVSS |
| 68. | I2L - VL | artificial | Aa | QTVVTQEPSLTVSPGGTVTITCGSSTGAVTSGN |
| | | | | YPNWIQKKPGQAPRGLIGGTKFLAPGTPARFSG |
| | | | | SLEGGKAALTLSGVQPEDEAEYYCVLYYSNR |
| | | | | WVFGSGTKLTVL |
| 69. | I2M2 - HCDR1 | artificial | Aa | KYAIN |
| 70. | I2M2 - HCDR2 | artificial | Aa | RIRSKYNNYATYYADAVKD |
| 71. | I2M2 - HCDR3 | artificial | Aa | NANFGTSYISYFAY |
| 72. | I2M2 - LCDR1 | artificial | Aa | GSSTGAVTSGNYPN |
| 73. | I2M2 - LCDR2 | artificial | Aa | GTKFLAP |
| 74. | I2M2 - LCDR3 | artificial | Aa | VLWYSNRWV |
| 75. | I2M2 - VH | artificial | aa | EVQLVESGGGLVQPGGSLKLSCAASGFTFNKY |
| | | | | AINWVREAPGKGLEWVARIRSKYNNYATYYA |
| | | | | DAVKDRFTISRDDSKNTAYLQMNNLKTEDTA |
| | | | | VYYCVRNANFGTSYISYFAYWGQGTLVTVSS |
| 76. | I2M2 - VL | artificial | aa | QTVVTQEPSLTVSPGGTVTLTCGSSTGAVTSGN |
| | | | | YPNWVQKKPGQAPRGLIGGTKFLAPGTPARFS |
| | | | | GSLLGGKAALTLSGVQPEDEAEYYCVLWYSN |
| | | | | RWVFGSGTKLTVL |
| 77. | MS 01-G11 CC - | artificial | aa | DYYMT |
| | HCDR1 | | | |
| 78. | MS 01-G11 CC - | artificial | aa | YISSSGSTIYYAEAVKG |
| | HCDR2 | | | |
| 79. | MS 01-G11 CC - | artificial | aa | DRNSHFDY |
| | HCDR3 | | | |
| 80. | MS 01-G11 CC - | artificial | aa | RASQGIRTWLA |
| | LCDR1 | | | |
| 81. | MS 01-G11 CC - | artificial | aa | GASGLQS |
| | LCDR2 | | | |
| 82. | MS 01-G11 CC - | artificial | aa | QQAESFPRT |
| | LCDR3 | | | |
| 83. | MS 01-G11 CC - | artificial | Aa | QVQLVESGGGLVKPGGSLRLSCAASGFTFSDY |
| | VH | | | YMTWIRQAPGKCLEWLSYISSSGSTIYYAEAV |
| | | | | KGRFTISRDNAKNSLFLQMNSLRAEDTAVYYC |
| | | | | ARDRNSHFDYWGQGTLVTVSS |
| 84. | MS 01-G11 CC - | artificial | Aa | DIMTQSPSSVSASVGDRVTITCRASQGIRTWLA |
| | VL | | | WYQQKPGKAPKLLIYGASGLQSGVPSRFSGSG |
| | | | | SGTDFTLTISSLQPEDFATYYCQQAESFPRTFGC |
| | | | | GTKVEIK |
| 85. | MS 01-G11 CC EI - | artificial | Aa | EIMTQSPSSVSASVGDRVTITCRASQGIRTWLA |
| | VL | | | WYQQKPGKAPKLLIYGASGLQSGVPSRFSGSG |
| | | | | SGTDFTLTISSLQPEDFATYYCQQAESFPRTFGC |
| | | | | GTKVEIK |
| 86. | MS 15-B12 CC - | artificial | Aa | SSSYFWG |
| | HCDR1 | | | |
| 87. | MS 15-B12 CC - | artificial | Aa | NIYYSGSSNYNPSLKS |
| | HCDR2 | | | |
| 88. | MS 15-B12 CC - | artificial | Aa | LPRGDRDAFDI |
| | HCDR3 | | | |
| 89. | MS 15-B12 CC - | artificial | Aa | RASQGISNYLA |
| | LCDR1 | | | |
| 90. | MS 15-B12 CC - | artificial | Aa | AASTLQS |
| | LCDR2 | | | |
| 91. | MS 15-B12 CC - | artificial | Aa | QQSYSTPFT |
| | LCDR3 | | | |
| 92. | MS 15-B12 CC - | artificial | aa | QVQLQESGPGLVKPSETLSLTCTVSGGSISSSSY |
| | VH | | | FWGWIRQPPGKCLEWIGNIYYSGSSNYNPSLKS |
| | | | | RVTISVDTSKNQFSLKLSSVTAADTAVYYCAR |
| | | | | LPRGDRDAFDIWGQGTMVTVSS |
| 93. | MS 15-B12 CC - | artificial | aa | DIVMTQSPSSLSASVGDRVTITCRASQGISNYL |
| | VL | | | AWYQQKPGKVPKLLIYAASTLQSGVPSRFSGS |
| | | | | GSGTDFTLTISSLQPEDFATYYCQQSYSTPFTFG |
| | | | | CGTKVEIK |
| 94. | MS 15-B12 CC EI - | artificial | aa | EIVMTQSPSSLSASVGDRVTITCRASQGISNYLA |
| | VL | | | WYQQKPGKVPKLLIYAASTLQSGVPSRESGSG |
| | | | | SGTDFTLTISSLQPEDFATYYCQQSYSTPFTFGC |
| | | | | GTKVEIK |
| 95. | MS 25-E3 CC - | artificial | aa | SSSYFWV |
| | HCDR1 | | | |
| 96. | MS 25-E3 CC - | artificial | aa | SIYYSGSTYYNPSLKS |
| | HCDR2 | | | |
| 97. | MS 25-E3 CC - | artificial | aa | LPRGDRMTFDI |
| | HCDR3 | | | |
| 98. | MS 25-E3 CC - | artificial | aa | RASQSVSSSYLA |
| | LCDR1 | | | |
| 99. | MS 25-E3 CC - | artificial | aa | GASSRAT |
| | LCDR2 | | | |
| 100. | MS 25-E3 CC - | artificial | Aa | QQYGSSPFT |
| | LCDR3 | | | |
| 101. | MS 25-E3 CC - | artificial | Aa | QVQLQESGPGLVKPSETLSLTCTVSGGSISSSSY |
| | VH | | | FWVWIRQPPGKCLEWIGSIYYSGSTYYNPSLKS |
| | | | | RVTISVDTSKNQFSLKLNSVTAADTAVYYCAR |
| | | | | LPRGDRMTFDIWGQGTMVTVSS |
| 102. | MS 25-E3 CC - | artificial | Aa | EIVLTQSPGTLSLSPGERATLSCRASQSVSSSYL |
| | VL | | | AWYQQKPGQAPRLLIYGASSRATGIPDRESGSG |
| | | | | SGTDFTLTISRLEPEDFAVYYCQQYGSSPFTFGC |
| | | | | GTKLEIK |
| 103. | MS 36-C5 CC - | artificial | Aa | SYAMS |
| | HCDR1 | | | |
| 104. | MS 36-C5 CC - | artificial | Aa | AISGSGEQWYYAPSVKG |
| | HCDR2 | | | |
| 105. | MS 36-C5 CC - | artificial | Aa | VRNYYGSGSLDY |
| | HCDR3 | | | |
| 106. | MS 36-C5 CC - | artificial | Aa | RASQSFSSAYLA |
| | LCDR1 | | | |
| 107. | MS 36-C5 CC - | artificial | Aa | GASIRAT |
| | LCDR2 | | | |
| 108. | MS 36-C5 CC - | artificial | Aa | QQYGSSLT |
| | LCDR3 | | | |
| 109. | MS 36-C5 CC - | artificial | aa | EVQLLESGGGVVQPGRSLRLSCAASGFTFSSYA |
| | VH | | | MSWVRQAPGKCLEWVSAISGSGEQWYYAPSV |
| | | | | KGRFTISRDNSKNTLYLQMNSLRAEDTAVYYC |
| | | | | AKVRNYYGSGSLDYWGQGTLVTVSS |
| 110. | MS 36-C5 CC - | artificial | aa | EIVLTQSPGTLSLSPGERATLSCRASQSFSSAYL |
| | VL | | | AWYQQKPGQAPRLLIYGASIRATGIPDRESGSG |
| | | | | SGTDFTLTISRLEPEDFAVYYCQQYGSSLTFGC |
| | | | | GTKVEIK |
| 111. | MS 36-G7 CC - | artificial | aa | SYAMS |
| | HCDR1 | | | |
| 112. | MS 36-G7 CC - | artificial | aa | AISGSGEGDYYANSVKG |
| | HCDR2 | | | |
| 113. | MS 36-G7 CC - | artificial | aa | VRNYYGSGSLDY |
| | HCDR3 | | | |
| 114. | MS 36-G7 CC - | artificial | aa | RASQSVSSTYLA |
| | LCDR1 | | | |
| 115. | MS 36-G7 CC - | artificial | aa | GASIRAT |
| | LCDR2 | | | |
| 116. | MS 36-G7 CC - | artificial | aa | QQYGSSLT |
| | LCDR3 | | | |
| 117. | MS 36-G7 CC - | artificial | Aa | EVQLLESGGGVVQPGRSLRLSCAASGFTFSSYA |
| | VH | | | MSWVRQAPGMCLEWVSAISGSGEGDYYANSV |
| | | | | KGRFTISRDNSKNTLYLQMNSLRAEDTAVYYC |
| | | | | AKVRNYYGSGSLDYWGQGTLVTVSS |
| 118. | MS 36-G7 CC - | artificial | Aa | EIVLTQSPGTLSLSPGERATLSCRASQSVSSTYL |
| | VL | | | AWYQQKPGQAPRLLIYGASIRATGIPDRESGSG |
| | | | | SGTDFTLTISRLEPEDFAVYYCQQYGSSLTFGC |
| | | | | GTKVEIK |
| 119. | MS 37-E5 CC - | artificial | Aa | SYAMS |
| | HCDR1 | | | |
| 120. | MS 37-E5 CC - | artificial | Aa | AISGSGGSTYYAIDVKG |
| | HCDR2 | | | |
| 121. | MS 37-E5 CC - | artificial | Aa | EGYYPGSGYPLYYYFGMDV |
| | HCDR3 | | | |
| 122. | MS 37-E5 CC - | artificial | Aa | RASQSVSSSYLA |
| | LCDR1 | | | |
| 123. | MS 37-E5 CC - | artificial | Aa | GASSRAT |
| | LCDR2 | | | |
| 124. | MS 37-E5 CC - | artificial | Aa | QQYGSSPIFT |
| | LCDR3 | | | |
| 125. | MS 37-E5 CC - | artificial | Aa | EVQLLESGGGLVQPGGSLRLSCAASGFTFSSYA |
| | VH | | | MSWVRQAPGKCLEWVSAISGSGGSTYYAIDV |
| | | | | KGRFTISRDNSKNTLYLQMNSLRAEDTAVYYC |
| | | | | AKEGYYPGSGYPLYYYFGMDVWGQGTTVTVS |
| | | | | S |
| 126. | MS 37-E5 CC - | artificial | aa | EIVLTQSPGTLSLSPGERATLSCRASQSVSSSYL |
| | VL | | | AWYQQKPGQAPRLLIYGASSRATGIPDRFSGSG |
| | | | | SGTDFTLTISRLEPEDFAVYYCQQYGSSPIFTFG |
| | | | | CGTKVEIK |
| 127. | MS 46-A3 CC - | artificial | aa | SYGMG |
| | HCDR1 | | | |
| 128. | MS 46-A3 CC - | artificial | aa | VISYHGSNKYYADAVKG |
| | HCDR2 | | | |
| 129. | MS 46-A3 CC - | artificial | aa | EGAHFGSGSYYPLYYYYAMDV |
| | HCDR3 | | | |
| 130. | MS 46-A3 CC - | artificial | aa | RASQSVSSSYLA |
| | LCDR1 | | | |
| 131. | MS 46-A3 CC - | artificial | aa | GASIRAT |
| | LCDR2 | | | |
| 132. | MS 46-A3 CC - | artificial | aa | QQTGSSPIFT |
| | LCDR3 | | | |
| 133. | MS 46-A3 CC - | artificial | aa | QVQLVESGGGVVQPGRSLRLSCAASGFTFSSY |
| | VH | | | GMGWVRQAPGKCLEWVAVISYHGSNKYYAD |
| | | | | AVKGRFTISRDNSKNTLYLQMNSLRAEDTAVY |
| | | | | YCAREGAHFGSGSYYPLYYYYAMDVWGQGT |
| | | | | TVTVSS |
| 134. | MS 46-A3 CC - | artificial | Aa | EIVTQSPGTLSLSPGERATLSCRASQSVSSSYLA |
| | VL | | | WYQQKPGQAPRLLIYGASIRATGIPDRFSGSGS |
| | | | | GTDFTLTISRLEPEDFAVYYCQQTGSSPIFTFGC |
| | | | | GTKVEIK |
| 135. | MS R195L CC - | artificial | Aa | SYAMS |
| | HCDR1 | | | |
| 136. | MS R195L CC - | artificial | Aa | AISGSGEFSYYAAAVKG |
| | HCDR2 | | | |
| 137. | MS R195L CC - | artificial | Aa | VRNYYGSGSLDY |
| | HCDR3 | | | |
| 138. | MS R195L CC - | artificial | Aa | RASQSVSSTYLA |
| | LCDR1 | | | |
| 139. | MS R195L CC - | artificial | Aa | GASIRAT |
| | LCDR2 | | | |
| 140. | MS R195L CC - | artificial | Aa | QQYQSSLT |
| | LCDR3 | | | |
| 141. | MS R195L CC - | artificial | Aa | EVQLLESGGGVVQPGRSLRLSCAASGFTFSSYA |
| | VH | | | MSWVRQAPGKCLEWVSAISGSGEFSYYAAAV |
| | | | | KGRFTISRDNSKNTLYLQMNSLRAEDTAVYYC |
| | | | | AKVRNYYGSGSLDYWGQGTLVTVSS |
| 142. | MS R195L CC - | artificial | Aa | EIVLTQSPGTLSLSPGERATLSCRASQSVSSTYL |
| | VL | | | AWYQQKPGQAPRLLIYGASIRATGIPDRESGSG |
| | | | | SGTDFTLTISRLEPEDFAVYYCQQYQSSLTFGC |
| | | | | GTKVEIK |
| 143. | MS R4L CC - | artificial | aa | GYYIH |
| | HCDR1 | | | |
| 144. | MS R4L CC - | artificial | aa | WINPNSGGTNYAQKFQG |
| | HCDR2 | | | |
| 145. | MS R4L CC - | artificial | aa | VEAVAGREYYYFSGMDV |
| | HCDR3 | | | |
| 146. | MS R4L CC - | artificial | aa | SGEKLGDKYVY |
| | LCDR1 | | | |
| 147. | MS R4L CC - | artificial | aa | QSTKRPS |
| | LCDR2 | | | |
| 148. | MS R4L CC - | artificial | aa | QAYHASTAV |
| | LCDR3 | | | |
| 149. | MS R4L CC - VH | artificial | aa | QVQLVQSGAEVKKPGASVKVSCKASGYTFTG |
| | | | | YYIHWVRQAPGQCLEWMGWINPNSGGTNYA |
| | | | | QKFQGRVTMTRDTSISTAYMELSRLRSDDTAV |
| | | | | YYCARVEAVAGREYYYFSGMDVWGQGTTVT |
| | | | | VSS |
| 150. | MS R4L CC - VL | artificial | aa | SYELTQPPSVSVSPGQTASITCSGEKLGDKYVY |
| | | | | WYQQKPGQSPVLVIYQSTKRPSGVPERFSGSNS |
| | | | | GNTATLTISGTQAMDEADYYCQAYHASTAVF |
| | | | | GCGTKLTVL |
| 151. | MS H2 - HCDR1 | artificial | Aa | SYGMG |
| 152. | MS H2 - HCDR2 | artificial | Aa | VISYDGSNKYYADSVKG |
| 153. | MS H2 - HCDR3 | artificial | Aa | EGAHFGSGSYYPLYYYYAMDV |
| 154. | MS H2 - LCDR1 | artificial | Aa | RASQSVSSSYLA |
| 155. | MS H2 - LCDR2 | artificial | Aa | GASIRAT |
| 156. | MS H2 - LCDR3 | artificial | Aa | QQYGSSPIFT |
| 157. | MS H2 - VH | artificial | Aa | EVQLLESGGGVVQPGRSLRLSCAASGFTFSSYG |
| | | | | MGWVRQAPGKGLEWVAVISYDGSNKYYADS |
| | | | | VKGRFTISRDNSKNTLYLQMNSLRAEDTAVYY |
| | | | | CAREGAHFGSGSYYPLYYYYAMDVWGQGTT |
| | | | | VTVSS |
| 158. | MS H2 - VL | artificial | Aa | ELTLTQSPGTLSLSPGERATLSCRASQSVSSSYL |
| | | | | AWYQQKPGQAPRLLIYGASIRATGIPDRESGSG |
| | | | | SGTDFTLTISRLEPEDFAVYYCQQYGSSPIFTFG |
| | | | | PGTKVEIK |
| 159. | CH3 005-D5 CC - | artificial | Aa | SYPIN |
| | HCDR1 | | | |
| 160. | CH3 005-D5 CC - | artificial | aa | VIWTGGGTNYASSVKG |
| | HCDR2 | | | |
| 161. | CH3 005-D5 CC - | artificial | aa | SRGVYDFKGRGAMDY |
| | HCDR3 | | | |
| 162. | CH3 005-D5 CC - | artificial | aa | KSSQSLLYSSNQKNYFA |
| | LCDR1 | | | |
| 163. | CH3 005-D5 CC - | artificial | aa | WASTRES |
| | LCDR2 | | | |
| 164. | CH3 005-D5 CC - | artificial | aa | QQYYSYPYT |
| | LCDR3 | | | |
| 165. | CH3 005-D5 CC - | artificial | aa | EVQLLESGGGLVQPGGSLRLSCAASGFSFSSYPI |
| | VH | | | NWVRQAPGKCLEWVGVIWTGGGTNYASSVK |
| | | | | GRFTISRDNSKNTVYLQMNSLRAEDTAVYYCA |
| | | | | KSRGVYDFKGRGAMDYWGQGTLVTVSS |
| 166. | CH3 005-D5 CC - | artificial | aa | DIVMTQSPDSLAVSLGERATINCKSSQSLLYSS |
| | VL | | | NQKNYFAWYQQKPGQPPKLLIYWASTRESGV |
| | | | | PDRFSGSGSGTDFTLTISSLQAEDVAVYYCQQY |
| | | | | YSYPYTFGCGTKLEIK |
| 167. | CH3 005-D5 CC | artificial | aa | EIVMTQSPDSLAVSLGERATINCKSSQSLLYSSN |
| | EI - VL | | | QKNYFAWYQQKPGQPPKLLIYWASTRESGVP |
| | | | | DRFSGSGSGTDFTLTISSLQAEDVAVYYCQQY |
| | | | | YSYPYTFGCGTKLEIK |
| 168. | CH3 03-C8 CC - | artificial | Aa | SYWMH |
| | HCDR1 | | | |
| 169. | CH3 03-C8 CC - | artificial | Aa | VISGSKSYTIYNQKVKG |
| | HCDR2 | | | |
| 170. | CH3 03-C8 CC - | artificial | Aa | SGPGYFDV |
| | HCDR3 | | | |
| 171. | CH3 03-C8 CC - | artificial | Aa | RASENIYSYLA |
| | LCDR1 | | | |
| 172. | CH3 03-C8 CC - | artificial | Aa | NAKTLAE |
| | LCDR2 | | | |
| 173. | CH3 03-C8 CC - | artificial | Aa | QHLNMTPYT |
| | LCDR3 | | | |
| 174. | CH3 03-C8 CC - | artificial | Aa | EVQLLESGGGLVQPGGSLRLSCAASGYTFSSY |
| | VH | | | WMHWVRQAPGKCLEWMGVISGSKSYTIYNQ |
| | | | | KVKGRFTISRDNSKNTVYLQMNSLRAGDTAV |
| | | | | YYCARSGPGYFDVWGQGTMVTVSS |
| 175. | CH3 03-C8 CC - | artificial | Aa | DIQLTQSPSFLSASVGDRVTITCRASENIYSYLA |
| | VL | | | WYQQKPGKAPKLLIYNAKTLAEGVPSRFSGSG |
| | | | | SGTEFTLTISSLQPEDFGTYYCQHLNMTPYTFG |
| | | | | CGTKLEIK |
| 176. | CH3 03-C8 CC | artificial | Aa | EIQLTQSPSFLSASVGDRVTITCRASENIYSYLA |
| | EI - VL | | | WYQQKPGKAPKLLIYNAKTLAEGVPSRFSGSG |
| | | | | SGTEFTLTISSLQPEDFGTYYCQHLNMTPYTFG |
| | | | | CGTKLEIK |
| 177. | CH3 08-A11 CC - | artificial | aa | SYWMH |
| | HCDR1 | | | |
| 178. | CH3 08-A11 CC - | artificial | aa | KIDPSDDYTNYNQKVKG |
| | HCDR2 | | | |
| 179. | CH3 08-A11 CC - | artificial | aa | WDYNYFDV |
| | HCDR3 | | | |
| 180. | CH3 08-A11 CC - | artificial | aa | RASSSVSYMH |
| | LCDR1 | | | |
| 181. | CH3 08-A11 CC - | artificial | aa | GTSNLVS |
| | LCDR2 | | | |
| 182. | CH3 08-A11 CC - | artificial | aa | QQWSSYPLT |
| | LCDR3 | | | |
| 183. | CH3 08-A11 CC - | artificial | aa | EVQLLESGGGLVQPGGSLRLSCAASGFTFSSY |
| | VH | | | WMHWVRQTPGKCLEWVSKIDPSDDYTNYNQ |
| | | | | KVKGRFTISIDKSKNTLYLQMNSLRAEDTAVY |
| | | | | YCARWDYNYFDVWGQGTTVTVSS |
| 184. | CH3 08-A11 CC - | artificial | aa | EIVMTQSPATLSVSPGERATLTCRASSSVSYMH |
| | VL | | | WYQQKPGQAPRLLIYGTSNLVSGVPARFSGSG |
| | | | | SGTEFTLTISSLQSEDFAVYYCQQWSSYPLTFG |
| | | | | CGTKVEIK |
| 185. | CH3 14-D1 CC - | artificial | Aa | SYWMH |
| | HCDR1 | | | |
| 186. | CH3 14-D1 CC - | artificial | Aa | VIYTSGSYTIYNQKFQG |
| | HCDR2 | | | |
| 187. | CH3 14-D1 CC - | artificial | Aa | SGPGYFDV |
| | HCDR3 | | | |
| 188. | CH3 14-D1 CC - | artificial | Aa | RASGNIHNYLA |
| | LCDR1 | | | |
| 189. | CH3 14-D1 CC - | artificial | Aa | NAKTLAE |
| | LCDR2 | | | |
| 190. | CH3 14-D1 CC - | artificial | Aa | QHFAWTPYT |
| | LCDR3 | | | |
| 191. | CH3 14-D1 CC - | artificial | Aa | QVQLVQSGAEVKKPGASVKVSCKASGYTFTSY |
| | VH | | | WMHWVRQAPGQCLEWMGVIYTSGSYTIYNQ |
| | | | | KFQGRVTMTRDTSTSTAYMELSSLRSEDTAVY |
| | | | | YCARSGPGYFDVWGQGTMVTVSS |
| 192. | CH3 14-D1 CC - | artificial | Aa | DIQLTQSPSFLSASVGDRVTITCRASGNIHNYLA |
| | VL | | | WYQQKPGKAPKLLIYNAKTLAEGVPSRFSGSG |
| | | | | SGTEFTLKISSLQPEDFATYYCQHFAWTPYTFG |
| | | | | CGTKLEIK |
| 193. | CH3 14-D1 CC EI - | artificial | Aa | EIQLTQSPSFLSASVGDRVTITCRASGNIHNYLA |
| | VL | | | WYQQKPGKAPKLLIYNAKTLAEGVPSRFSGSG |
| | | | | SGTEFTLKISSLQPEDFATYYCQHFAWTPYTFG |
| | | | | CGTKLEIK |
| 194. | CH3 15-E11 CC - | artificial | aa | NYWMN |
| | HCDR1 | | | |
| 195. | CH3 15-E11 CC - | artificial | aa | NIAYGVKGTNYNQKFQG |
| | HCDR2 | | | |
| 196. | CH3 15-E11 CC - | artificial | aa | RYFYVMDY |
| | HCDR3 | | | |
| 197. | CH3 15-E11 CC - | artificial | aa | RASQDISNYLN |
| | LCDR1 | | | |
| 198. | CH3 15-E11 CC - | artificial | aa | YTSRLHS |
| | LCDR2 | | | |
| 199. | CH3 15-E11 CC - | artificial | aa | VQYAQFPLT |
| | LCDR3 | | | |
| 200. | CH3 15-E11 CC - | artificial | aa | QVQLVQSGAEVKKPGASVKVSCKASGYTFTN |
| | VH | | | YWMNWVRQAPGQCLEWMGNIAYGVKGTNY |
| | | | | NQKFQGRVTMTVDTSSSTAYMELSRLRSDDTA |
| | | | | VYYCATRYFYVMDYWGQGTLVTVSS |
| 201. | CH3 15-E11 CC - | artificial | aa | DIQMTQSPSSLSASVGDRVTITCRASQDISNYL |
| | VL | | | NWYQQKPGKVPKLLIYYTSRLHSGVPSRFSGS |
| | | | | GSGTDFTLTISSLQPEDVATYYCVQYAQFPLTF |
| | | | | GCGTKVEIK |
| 202. | CH3 15-E11 CC | artificial | Aa | EIQMTQSPSSLSASVGDRVTITCRASQDISNYLN |
| | EI - VL | | | WYQQKPGKVPKLLIYYTSRLHSGVPSRFSGSGS |
| | | | | GTDFTLTISSLQPEDVATYYCVQYAQFPLTFGC |
| | | | | GTKVEIK |
| 203. | CH3 22-A12 CC - | artificial | Aa | SSWMN |
| | HCDR1 | | | |
| 204. | CH3 22-A12 CC - | artificial | Aa | RIYTGTGETKYSGKFQG |
| | HCDR2 | | | |
| 205. | CH3 22-A12 CC - | artificial | Aa | QRDYGALYAMDY |
| | HCDR3 | | | |
| 206. | CH3 22-A12 CC - | artificial | Aa | RASDDIYSYLA |
| | LCDR1 | | | |
| 207. | CH3 22-A12 CC - | artificial | Aa | NAKTLAE |
| | LCDR2 | | | |
| 208. | CH3 22-A12 CC - | artificial | Aa | QNHDRTPFT |
| | LCDR3 | | | |
| 209. | CH3 22-A12 CC - | artificial | Aa | QVQLVQSGAEVVKPGASVKVSCKASGYTFTSS |
| | VH | | | WMNWVRQAPGQCLEWMGRIYTGTGETKYSG |
| | | | | KFQGRVTITRDTSASTAYMELSSLTSEDTAVYY |
| | | | | CARQRDYGALYAMDYWGQGTLVTVSS |
| 210. | CH3 22-A12 CC - | artificial | Aa | DIQLTQSPSFLSASVGDRVTITCRASDDIYSYLA |
| | VL | | | WYQQKPGKAPKLLVYNAKTLAEGVPSRFSGS |
| | | | | GSGTEFTLTISSLQPEDFATYYCQNHDRTPFTFG |
| | | | | CGTKVDIK |
| 211. | CH3 22-A12 CC | artificial | aa | EIQLTQSPSFLSASVGDRVTITCRASDDIYSYLA |
| | EI - VL | | | WYQQKPGKAPKLLVYNAKTLAEGVPSRFSGS |
| | | | | GSGTEFTLTISSLQPEDFATYYCQNHDRTPFTFG |
| | | | | CGTKVDIK |
| 212. | CH3 24-D7 CC - | artificial | aa | NYWMN |
| | HCDR1 | | | |
| 213. | CH3 24-D7 CC - | artificial | aa | NIHSKAHGTNYNQKFQG |
| | HCDR2 | | | |
| 214. | CH3 24-D7 CC - | artificial | aa | RYFYVMDY |
| | HCDR3 | | | |
| 215. | CH3 24-D7 CC - | artificial | aa | RASQDISNYLN |
| | LCDR1 | | | |
| 216. | CH3 24-D7 CC - | artificial | aa | YTSRLHS |
| | LCDR2 | | | |
| 217. | CH3 24-D7 CC - | artificial | aa | VQYAQFPLT |
| | LCDR3 | | | |
| 218. | CH3 24-D7 CC - | artificial | aa | QVQLVQSGAEVKKPGASVKVSCKASGYTFTN |
| | VH | | | YWMNWVRQAPGQCLEWMGNIHSKAHGTNY |
| | | | | NQKFQGRVTMTVDTSSSTAYMELSRLRSDDTA |
| | | | | VYYCATRYFYVMDYWGQGTLVTVSS |
| 219. | CH3 24-D7 CC - | artificial | Aa | DIQMTQSPSSLSASVGDRVTITCRASQDISNYL |
| | VL | | | NWYQQKPGKVPKLLIYYTSRLHSGVPSRFSGS |
| | | | | GSGTDFTLTISSLQPEDVATYYCVQYAQFPLTF |
| | | | | GCGTKVEIK |
| 220. | CH3 24-D7 CC EI - | artificial | Aa | EIQMTQSPSSLSASVGDRVTITCRASQDISNYLN |
| | VL | | | WYQQKPGKVPKLLIYYTSRLHSGVPSRFSGSGS |
| | | | | GTDFTLTISSLQPEDVATYYCVQYAQFPLTFGC |
| | | | | GTKVEIK |
| 221. | CH3 26-E5 CC - | artificial | Aa | SYWMH |
| | HCDR1 | | | |
| 222. | CH3 26-E5 CC - | artificial | Aa | VIRTSTSYTIYNQKFKG |
| | HCDR2 | | | |
| 223. | CH3 26-E5 CC - | artificial | Aa | SGPGYFDV |
| | HCDR3 | | | |
| 224. | CH3 26-E5 CC - | artificial | Aa | RASENIYSYLA |
| | LCDR1 | | | |
| 225. | CH3 26-E5 CC - | artificial | Aa | NAKTLAE |
| | LCDR2 | | | |
| 226. | CH3 26-E5 CC - | artificial | Aa | QHNYGTPYT |
| | LCDR3 | | | |
| 227. | CH3 26-E5 CC - | artificial | Aa | QVQLVQSGAEVKKPGASVKVSCKASGYTFTSY |
| | VH | | | WMHWVRQAPGQCLEWMGVIRTSTSYTIYNQK |
| | | | | FKGRVTMTRDTSTSTVYMELSSLRSEDTAVYY |
| | | | | CARSGPGYFDVWGQGTMVTVSS |
| 228. | CH3 26-E5 CC - | artificial | aa | DIQLTQSPSFLSASVGDRVTITCRASENIYSYLA |
| | VL | | | WYQQKPGKAPKLLIYNAKTLAEGVPSRFSGSG |
| | | | | SGTEFTLTISSLQPEDFATYYCQHNYGTPYTFG |
| | | | | CGTKLEIK |
| 229. | CH3 26-E5 CC EI - | artificial | aa | EIQLTQSPSFLSASVGDRVTITCRASENIYSYLA |
| | VL | | | WYQQKPGKAPKLLIYNAKTLAEGVPSRFSGSG |
| | | | | SGTEFTLTISSLQPEDFATYYCQHNYGTPYTFG |
| | | | | CGTKLEIK |
| 230. | CH3 R164L CC - | artificial | aa | SYWMY |
| | HCDR1 | | | |
| 231. | CH3 R164L CC - | artificial | aa | KIDPSDDYTNYNQKVKG |
| | HCDR2 | | | |
| 232. | CH3 R164L CC - | artificial | aa | WDYTHFDV |
| | HCDR3 | | | |
| 233. | CH3 R164L CC - | artificial | aa | RASSSVSYMH |
| | LCDR1 | | | |
| 234. | CH3 R164L CC - | artificial | aa | GTSNLAS |
| | LCDR2 | | | |
| 235. | CH3 R164L CC - | artificial | aa | QQWSSYPLT |
| | LCDR3 | | | |
| 236. | CH3 R164L CC - | artificial | Aa | EVQLLESGGGLVQPGGSVRLSCAASGFTESSY |
| | VH | | | WMYWVRQAPGKCLEWVSKIDPSDDYTNYNQ |
| | | | | KVKGRFTISIDNSKNTLYLQMNSLRAEDSAVY |
| | | | | YCARWDYTHFDVWGQGTTVTVSS |
| 237. | CH3 R164L CC - | artificial | Aa | EIVMTQSPATLSVSPGERATLSCRASSSVSYMH |
| | VL | | | WYQQKPGQAPRLLIYGTSNLASGVPVRFSGSG |
| | | | | SGTEFTLTISRLQSEDVAVYYCQQWSSYPLTFG |
| | | | | CGTKVEIK |
| 238. | CH3 R170R CC - | artificial | Aa | SYWMH |
| | HCDR1 | | | |
| 239. | CH3 R170R CC - | artificial | Aa | KIDPSDDYTNYNQKVKG |
| | HCDR2 | | | |
| 240. | CH3 R170R CC - | artificial | Aa | WDYSHFDV |
| | HCDR3 | | | |
| 241. | CH3 R170R CC - | artificial | Aa | RASSSVSYMH |
| | LCDR1 | | | |
| 242. | CH3 R170R CC - | artificial | Aa | GTSNLVS |
| | LCDR2 | | | |
| 243. | CH3 R170R CC - | artificial | Aa | QQWSSYPLT |
| | LCDR3 | | | |
| 244. | CH3 R170R CC - | artificial | Aa | EVQLLESGGGLVQPGGSLRLSCAASGFTFSSY |
| | VH | | | WMHWVRQTPGKCLEWVSKIDPSDDYTNYNQ |
| | | | | KVKGRFTISIDKSKNTLYLQMNSLRAEDTAVY |
| | | | | YCARWDYSHFDVWGQGTTVTVSS |
| 245. | CH3 R170R CC - | artificial | aa | EIVMTQSPATLSVSPGERATLTCRASSSVSYMH |
| | VL | | | WYQQKPGQAPRLLIYGTSNLVSGVPARFSGSG |
| | | | | SGTEFTLTISSLQSEDFAVYYCQQWSSYPLTFG |
| | | | | CGTKVEIK |
| 246. | CH3 005-D5 CCx | artificial | aa | EVQLLESGGGLVQPGGSLRLSCAASGFSFSSYPI |
| | I2Ccc(44/100)x | | | NWVRQAPGKCLEWVGVIWTGGGTNYASSVK |
| | (G4)x scFc x (G4) | | | GRFTISRDNSKNTVYLQMNSLRAEDTAVYYCA |
| | x MS 01-G11 CCx | | | KSRGVYDFKGRGAMDYWGQGTLVTVSSGGG |
| | I2Ccc(44/100) - | | | GSGGGGSGGGGSDIVMTQSPDSLAVSLGERATI |
| | Full Sequence | | | NCKSSQSLLYSSNQKNYFAWYQQKPGQPPKLL |
| | | | | IYWASTRESGVPDRFSGSGSGTDFTLTISSLQAE |
| | | | | DVAVYYCQQYYSYPYTFGCGTKLEIKSGGGGS |
| | | | | EVQLVESGGGLVQPGGSLKLSCAASGFTFNKY |
| | | | | AMNWVRQAPGKCLEWVARIRSKYNNYATYY |
| | | | | ADSVKDRFTISRDDSKNTAYLQMNNLKTEDTA |
| | | | | VYYCVRHGNFGNSYISYWAYWGQGTLVTVSS |
| | | | | GGGGSGGGGSGGGGSQTVVTQEPSLTVSPGGT |
| | | | | VTLTCGSSTGAVTSGNYPNWVQQKPGQAPRG |
| | | | | LIGGTKFLAPGTPARFSGSLLGGKAALTLSGVQ |
| | | | | PEDEAEYYCVLWYSNRWVFGCGTKLTVLGGG |
| | | | | GDKTHTCPPCPAPELLGGPSVFLFPPKPKDTLM |
| | | | | ISRTPEVTCVVVDVSHEDPEVKFNWYVDGVEV |
| | | | | HNAKTKPCEEQYGSTYRCVSVLTVLHQDWLN |
| | | | | GKEYKCKVSNKALPAPIEKTISKAKGQPREPQV |
| | | | | YTLPPSREEMTKNQVSLTCLVKGFYPSDIAVE |
| | | | | WESNGQPENNYKTTPPVLDSDGSFFLYSKLTV |
| | | | | DKSRWQQGNVFSCSVMHEALHNHYTQKSLSL |
| | | | | SPGKGGGGSGGGGSGGGGSGGGGSGGGGSGG |
| | | | | GGSDKTHTCPPCPAPELLGGPSVFLFPPKPKDT |
| | | | | LMISRTPEVTCVVVDVSHEDPEVKFNWYVDG |
| | | | | VEVHNAKTKPCEEQYGSTYRCVSVLTVLHQD |
| | | | | WLNGKEYKCKVSNKALPAPIEKTISKAKGQPR |
| | | | | EPQVYTLPPSREEMTKNQVSLTCLVKGFYPSDI |
| | | | | AVEWESNGQPENNYKTTPPVLDSDGSFFLYSK |
| | | | | LTVDKSRWQQGNVFSCSVMHEALHNHYTQKS |
| | | | | LSLSPGKGGGGQVQLVESGGGLVKPGGSLRLS |
| | | | | CAASGFTFSDYYMTWIRQAPGKCLEWLSYISSS |
| | | | | GSTIYYAEAVKGRFTISRDNAKNSLFLQMNSLR |
| | | | | AEDTAVYYCARDRNSHFDYWGQGTLVTVSSG |
| | | | | GGGSGGGGSGGGGSDIMTQSPSSVSASVGDRV |
| | | | | TITCRASQGIRTWLAWYQQKPGKAPKLLIYGA |
| | | | | SGLQSGVPSRFSGSGSGTDFTLTISSLQPEDFAT |
| | | | | YYCQQAESFPRTFGCGTKVEIKSGGGGSEVQL |
| | | | | VESGGGLVQPGGSLKLSCAASGFTFNKYAMN |
| | | | | WVRQAPGKCLEWVARIRSKYNNYATYYADSV |
| | | | | KDRFTISRDDSKNTAYLQMNNLKTEDTAVYYC |
| | | | | VRHGNFGNSYISYWAYWGQGTLVTVSSGGGG |
| | | | | SGGGGSGGGGSQTVVTQEPSLTVSPGGTVTLT |
| | | | | CGSSTGAVTSGNYPNWVQQKPGQAPRGLIGGT |
| | | | | KFLAPGTPARFSGSLLGGKAALTLSGVQPEDEA |
| | | | | EYYCVLWYSNRWVFGCGTKLTVL |
| 247. | CH3 08-A11 CC x | artificial | aa | EVQLLESGGGLVQPGGSLRLSCAASGFTFSSY |
| | I2Ccc(44/100)x | | | WMHWVRQTPGKCLEWVSKIDPSDDYTNYNQ |
| | (G4S)3x scFcx | | | KVKGRFTISIDKSKNTLYLQMNSLRAEDTAVY |
| | (G4S)3x MS R4L | | | YCARWDYNYFDVWGQGTTVTVSSGGGGSGG |
| | CCx | | | GGSGGGGSEIVMTQSPATLSVSPGERATLTCRA |
| | I2Ccc(44/100) - | | | SSSVSYMHWYQQKPGQAPRLLIYGTSNLVSGV |
| | Full Sequence | | | PARFSGSGSGTEFTLTISSLQSEDFAVYYCQQW |
| | | | | SSYPLTFGCGTKVEIKSGGGGSEVQLVESGGGL |
| | | | | VQPGGSLKLSCAASGFTFNKYAMNWVRQAPG |
| | | | | KCLEWVARIRSKYNNYATYYADSVKDRFTISR |
| | | | | DDSKNTAYLQMNNLKTEDTAVYYCVRHGNFG |
| | | | | NSYISYWAYWGQGTLVTVSSGGGGSGGGGSG |
| | | | | GGGSQTVVTQEPSLTVSPGGTVTLTCGSSTGA |
| | | | | VTSGNYPNWVQQKPGQAPRGLIGGTKFLAPGT |
| | | | | PARFSGSLLGGKAALTLSGVQPEDEAEYYCVL |
| | | | | WYSNRWVFGCGTKLTVLGGGGSGGGGSGGG |
| | | | | GSDKTHTCPPCPAPELLGGPSVFLFPPKPKDTL |
| | | | | MISRTPEVTCVVVDVSHEDPEVKFNWYVDGV |
| | | | | EVHNAKTKPCEEQYGSTYRCVSVLTVLHQDW |
| | | | | LNGKEYKCKVSNKALPAPIEKTISKAKGQPREP |
| | | | | QVYTLPPSREEMTKNQVSLTCLVKGFYPSDIAV |
| | | | | EWESNGQPENNYKTTPPVLDSDGSFFLYSKLT |
| | | | | VDKSRWQQGNVFSCSVMHEALHNHYTQKSLS |
| | | | | LSPGKGGGGSGGGGSGGGGSGGGGSGGGGSG |
| | | | | GGGSDKTHTCPPCPAPELLGGPSVFLFPPKPKD |
| | | | | TLMISRTPEVTCVVVDVSHEDPEVKFNWYVDG |
| | | | | VEVHNAKTKPCEEQYGSTYRCVSVLTVLHQD |
| | | | | WLNGKEYKCKVSNKALPAPIEKTISKAKGQPR |
| | | | | EPQVYTLPPSREEMTKNQVSLTCLVKGFYPSDI |
| | | | | AVEWESNGQPENNYKTTPPVLDSDGSFFLYSK |
| | | | | LTVDKSRWQQGNVFSCSVMHEALHNHYTQKS |
| | | | | LSLSPGKGGGGSGGGGSGGGGSQVQLVQSGA |
| | | | | EVKKPGASVKVSCKASGYTFTGYYIHWVRQA |
| | | | | PGQCLEWMGWINPNSGGTNYAQKFQGRVTMT |
| | | | | RDTSISTAYMELSRLRSDDTAVYYCARVEAVA |
| | | | | GREYYYFSGMDVWGQGTTVTVSSGGGGSGGG |
| | | | | GSGGGGSSYELTQPPSVSVSPGQTASITCSGEK |
| | | | | LGDKYVYWYQQKPGQSPVLVIYQSTKRPSGVP |
| | | | | ERFSGSNSGNTATLTISGTQAMDEADYYCQAY |
| | | | | HASTAVFGCGTKLTVLSGGGGSEVQLVESGGG |
| | | | | LVQPGGSLKLSCAASGFTFNKYAMNWVRQAP |
| | | | | GKCLEWVARIRSKYNNYATYYADSVKDRFTIS |
| | | | | RDDSKNTAYLQMNNLKTEDTAVYYCVRHGNF |
| | | | | GNSYISYWAYWGQGTLVTVSSGGGGSGGGGS |
| | | | | GGGGSQTVVTQEPSLTVSPGGTVTLTCGSSTG |
| | | | | AVTSGNYPNWVQQKPGQAPRGLIGGTKFLAPG |
| | | | | TPARFSGSLLGGKAALTLSGVQPEDEAEYYCV |
| | | | | LWYSNRWVFGCGTKLTVL |
| 248. | CH3 08-A11 CCx | artificial | aa | EVQLLESGGGLVQPGGSLRLSCAASGFTFSSY |
| | 6H10.09x | | | WMHWVRQTPGKCLEWVSKIDPSDDYTNYNQ |
| | (G4S)3x scFcx | | | KVKGRFTISIDKSKNTLYLQMNSLRAEDTAVY |
| | (G4S)3x MS R4L | | | YCARWDYNYFDVWGQGTTVTVSSGGGGSGG |
| | CCx 6H10.09 - | | | GGSGGGGSEIVMTQSPATLSVSPGERATLTCRA |
| | Full Sequence | | | SSSVSYMHWYQQKPGQAPRLLIYGTSNLVSGV |
| | | | | PARFSGSGSGTEFTLTISSLQSEDFAVYYCQQW |
| | | | | SSYPLTFGCGTKVEIKSGGGGSEVQLVESGGGL |
| | | | | VQPGGSLKLSCAASGFTFNKYAMNWVRQAPG |
| | | | | KGMEWVARIRSKYNNYATYYADAVKDRFTIS |
| | | | | RDDSKNTLYLQMNNLKTEDTAVYYCVRAGNF |
| | | | | GSSYISYFAYWGQGTLVTVSSGGGGSGGGGSG |
| | | | | GGGSQTVVTQEPSLTVSPGGTVTITCGSSTGAV |
| | | | | TSGNYPNWIQKKPGQAPRGLIGGTKFLAPGTP |
| | | | | ARFSGSLEGGKAALTLSGVQPEDEAEYYCVLY |
| | | | | YSNRWVFGSGTKLTVLGGGGSGGGGSGGGGS |
| | | | | DKTHTCPPCPAPELLGGPSVFLFPPKPKDTLMIS |
| | | | | RTPEVTCVVVDVSHEDPEVKFNWYVDGVEVH |
| | | | | NAKTKPCEEQYGSTYRCVSVLTVLHQDWLNG |
| | | | | KEYKCKVSNKALPAPIEKTISKAKGQPREPQVY |
| | | | | TLPPSREEMTKNQVSLTCLVKGFYPSDIAVEWE |
| | | | | SNGQPENNYKTTPPVLDSDGSFFLYSKLTVDKS |
| | | | | RWQQGNVFSCSVMHEALHNHYTQKSLSLSPG |
| | | | | KGGGGSGGGGSGGGGSGGGGSGGGGSGGGGS |
| | | | | DKTHTCPPCPAPELLGGPSVFLFPPKPKDTLMIS |
| | | | | RTPEVTCVVVDVSHEDPEVKFNWYVDGVEVH |
| | | | | NAKTKPCEEQYGSTYRCVSVLTVLHQDWLNG |
| | | | | KEYKCKVSNKALPAPIEKTISKAKGQPREPQVY |
| | | | | TLPPSREEMTKNQVSLTCLVKGFYPSDIAVEWE |
| | | | | SNGQPENNYKTTPPVLDSDGSFFLYSKLTVDKS |
| | | | | RWQQGNVFSCSVMHEALHNHYTQKSLSLSPG |
| | | | | KGGGGSGGGGSGGGGSQVQLVQSGAEVKKPG |
| | | | | ASVKVSCKASGYTFTGYYIHWVRQAPGQCLE |
| | | | | WMGWINPNSGGTNYAQKFQGRVTMTRDTSIS |
| | | | | TAYMELSRLRSDDTAVYYCARVEAVAGREYY |
| | | | | YFSGMDVWGQGTTVTVSSGGGGSGGGGSGGG |
| | | | | GSSYELTQPPSVSVSPGQTASITCSGEKLGDKY |
| | | | | VYWYQQKPGQSPVLVIYQSTKRPSGVPERFSG |
| | | | | SNSGNTATLTISGTQAMDEADYYCQAYHASTA |
| | | | | VFGCGTKLTVLSGGGGSEVQLVESGGGLVQPG |
| | | | | GSLKLSCAASGFTFNKYAMNWVRQAPGKGME |
| | | | | WVARIRSKYNNYATYYADAVKDRFTISRDDSK |
| | | | | NTLYLQMNNLKTEDTAVYYCVRAGNFGSSYIS |
| | | | | YFAYWGQGTLVTVSSGGGGSGGGGSGGGGSQ |
| | | | | TVVTQEPSLTVSPGGTVTITCGSSTGAVTSGNY |
| | | | | PNWIQKKPGQAPRGLIGGTKFLAPGTPARFSGS |
| | | | | LEGGKAALTLSGVQPEDEAEYYCVLYYSNRW |
| | | | | VFGSGTKLTVL |
| 249. | CH3 08-A11 CCx | artificial | aa | EVQLLESGGGLVQPGGSLRLSCAASGFTFSSY |
| | I2Ccc(44/100)x | | | WMHWVRQTPGKCLEWVSKIDPSDDYTNYNQ |
| | (G4)x scFc x (G4) | | | KVKGRFTISIDKSKNTLYLQMNSLRAEDTAVY |
| | x MS R4L CCx | | | YCARWDYNYFDVWGQGTTVTVSSGGGGSGG |
| | I2Ccc(44/100) - | | | GGSGGGGSEIVMTQSPATLSVSPGERATLTCRA |
| | Full Sequence | | | SSSVSYMHWYQQKPGQAPRLLIYGTSNLVSGV |
| | | | | PARFSGSGSGTEFTLTISSLQSEDFAVYYCQQW |
| | | | | SSYPLTFGCGTKVEIKSGGGGSEVQLVESGGGL |
| | | | | VQPGGSLKLSCAASGFTFNKYAMNWVRQAPG |
| | | | | KCLEWVARIRSKYNNYATYYADSVKDRFTISR |
| | | | | DDSKNTAYLQMNNLKTEDTAVYYCVRHGNFG |
| | | | | NSYISYWAYWGQGTLVTVSSGGGGSGGGGSG |
| | | | | GGGSQTVVTQEPSLTVSPGGTVTLTCGSSTGA |
| | | | | VTSGNYPNWVQQKPGQAPRGLIGGTKFLAPGT |
| | | | | PARFSGSLLGGKAALTLSGVQPEDEAEYYCVL |
| | | | | WYSNRWVFGCGTKLTVLGGGGDKTHTCPPCP |
| | | | | APELLGGPSVFLFPPKPKDTLMISRTPEVTCVV |
| | | | | VDVSHEDPEVKFNWYVDGVEVHNAKTKPCEE |
| | | | | QYGSTYRCVSVLTVLHQDWLNGKEYKCKVSN |
| | | | | KALPAPIEKTISKAKGQPREPQVYTLPPSREEM |
| | | | | TKNQVSLTCLVKGFYPSDIAVEWESNGQPENN |
| | | | | YKTTPPVLDSDGSFFLYSKLTVDKSRWQQGNV |
| | | | | FSCSVMHEALHNHYTQKSLSLSPGKGGGGSGG |
| | | | | GGSGGGGSGGGGSGGGGSGGGGSDKTHTCPP |
| | | | | CPAPELLGGPSVFLFPPKPKDTLMISRTPEVTCV |
| | | | | VVDVSHEDPEVKFNWYVDGVEVHNAKTKPCE |
| | | | | EQYGSTYRCVSVLTVLHQDWLNGKEYKCKVS |
| | | | | NKALPAPIEKTISKAKGQPREPQVYTLPPSREE |
| | | | | MTKNQVSLTCLVKGFYPSDIAVEWESNGQPEN |
| | | | | NYKTTPPVLDSDGSFFLYSKLTVDKSRWQQGN |
| | | | | VFSCSVMHEALHNHYTQKSLSLSPGKGGGGQ |
| | | | | VQLVQSGAEVKKPGASVKVSCKASGYTFTGY |
| | | | | YIHWVRQAPGQCLEWMGWINPNSGGTNYAQ |
| | | | | KFQGRVTMTRDTSISTAYMELSRLRSDDTAVY |
| | | | | YCARVEAVAGREYYYFSGMDVWGQGTTVTV |
| | | | | SSGGGGSGGGGSGGGGSSYELTQPPSVSVSPG |
| | | | | QTASITCSGEKLGDKYVYWYQQKPGQSPVLVI |
| | | | | YQSTKRPSGVPERFSGSNSGNTATLTISGTQAM |
| | | | | DEADYYCQAYHASTAVFGCGTKLTVLSGGGG |
| | | | | SEVQLVESGGGLVQPGGSLKLSCAASGFTFNK |
| | | | | YAMNWVRQAPGKCLEWVARIRSKYNNYATY |
| | | | | YADSVKDRFTISRDDSKNTAYLQMNNLKTEDT |
| | | | | AVYYCVRHGNFGNSYISYWAYWGQGTLVTVS |
| | | | | SGGGGSGGGGSGGGGSQTVVTQEPSLTVSPGG |
| | | | | TVTLTCGSSTGAVTSGNYPNWVQQKPGQAPR |
| | | | | GLIGGTKFLAPGTPARFSGSLLGGKAALTLSGV |
| | | | | QPEDEAEYYCVLWYSNRWVFGCGTKLTVL |
| 250. | CH3 15-E11 CC x | artificial | aa | QVQLVQSGAEVKKPGASVKVSCKASGYTFTN |
| | I2L x (G4Q)3x | | | YWMNWVRQAPGQCLEWMGNIAYGVKGTNY |
| | scFcmod x | | | NQKFQGRVTMTVDTSSSTAYMELSRLRSDDTA |
| | (G4Q)3 x MS 15- | | | VYYCATRYFYVMDYWGQGTLVTVSSGGGGQ |
| | B12 CC x I2L - | | | GGGGQGGGGQDIQMTQSPSSLSASVGDRVTIT |
| | Full Sequence | | | CRASQDISNYLNWYQQKPGKVPKLLIYYTSRL |
| | | | | HSGVPSRFSGSGSGTDFTLTISSLQPEDVATYYC |
| | | | | VQYAQFPLTFGCGTKVEIKSGGGGQEVQLVES |
| | | | | GGGLVQPGGSLKLSCAASGFTFNKYAMNWVR |
| | | | | QAPGKGMEWVARIRSKYNNYATYYADAVKD |
| | | | | RFTISRDDSKNTLYLQMNNLKTEDTAVYYCVR |
| | | | | AGNFGSSYISYFAYWGQGTLVTVSSGGGGQGG |
| | | | | GGQGGGGQQTVVTQEPSLTVSPGGTVTITCGS |
| | | | | STGAVTSGNYPNWIQKKPGQAPRGLIGGTKFL |
| | | | | APGTPARFSGSLEGGKAALTLSGVQPEDEAEY |
| | | | | YCVLYYSNRWVFGSGTKLTVLGGGGQGGGGQ |
| | | | | GGGGQCPPCPAPELLGGPSVFLFPPKPKDTLMI |
| | | | | SRTPEVTCVVVDVSHEEPEVKFNWYVDGVEV |
| | | | | HNAKTKPCEEQYGSTYRCVSVLTVLHQDWLN |
| | | | | GKEYKCKVSNKALPAPIEKTISKAKGQPREPQV |
| | | | | YTLPPSREEMTKNQVSLTCLVKGFYPSDIAVE |
| | | | | WESNGQPENNYKTTPPVLDSDGSFFLYSKLTV |
| | | | | DKSRWQQGNVFSCSVMHEALHNHYTQKSLSL |
| | | | | SPGKGGGGQGGGGQGGGGQGGGGQGGGGQG |
| | | | | GGGQCPPCPAPELLGGPSVFLFPPKPKDTLMIS |
| | | | | RTPEVTCVVVDVSHEEPEVKFNWYVDGVEVH |
| | | | | NAKTKPCEEQYGSTYRCVSVLTVLHQDWLNG |
| | | | | KEYKCKVSNKALPAPIEKTISKAKGQPREPQVY |
| | | | | TLPPSREEMTKNQVSLTCLVKGFYPSDIAVEWE |
| | | | | SNGQPENNYKTTPPVLDSDGSFFLYSKLTVDKS |
| | | | | RWQQGNVFSCSVMHEALHNHYTQKSLSLSPG |
| | | | | KGGGGQGGGGQGGGGQQVQLQESGPGLVKPS |
| | | | | ETLSLTCTVSGGSISSSSYFWGWIRQPPGKCLE |
| | | | | WIGNIYYSGSSNYNPSLKSRVTISVDTSKNQFSL |
| | | | | KLSSVTAADTAVYYCARLPRGDRDAFDIWGQ |
| | | | | GTMVTVSSGGGGQGGGGQGGGGQDIVMTQSP |
| | | | | SSLSASVGDRVTITCRASQGISNYLAWYQQKP |
| | | | | GKVPKLLIYAASTLQSGVPSRFSGSGSGTDFTL |
| | | | | TISSLQPEDFATYYCQQSYSTPFTFGCGTKVEIK |
| | | | | SGGGGQEVQLVESGGGLVQPGGSLKLSCAASG |
| | | | | FTFNKYAMNWVRQAPGKGMEWVARIRSKYN |
| | | | | NYATYYADAVKDRFTISRDDSKNTLYLQMNN |
| | | | | LKTEDTAVYYCVRAGNFGSSYISYFAYWGQGT |
| | | | | LVTVSSGGGGQGGGGQGGGGQQTVVTQEPSL |
| | | | | TVSPGGTVTITCGSSTGAVTSGNYPNWIQKKPG |
| | | | | QAPRGLIGGTKFLAPGTPARFSGSLEGGKAALT |
| | | | | LSGVQPEDEAEYYCVLYYSNRWVFGSGTKLT |
| | | | | VL |
| 251. | CH3 15-E11 CC x | artificial | aa | QVQLVQSGAEVKKPGASVKVSCKASGYTFTN |
| | I2L x G4 x scFc x | | | YWMNWVRQAPGQCLEWMGNIAYGVKGTNY |
| | G4 x MS 15-B12 | | | NQKFQGRVTMTVDTSSSTAYMELSRLRSDDTA |
| | CC x I2L_GQ - | | | VYYCATRYFYVMDYWGQGTLVTVSSGGGGQ |
| | Full Sequence | | | GGGGQGGGGQDIQMTQSPSSLSASVGDRVTIT |
| | | | | CRASQDISNYLNWYQQKPGKVPKLLIYYTSRL |
| | | | | HSGVPSRFSGSGSGTDFTLTISSLQPEDVATYYC |
| | | | | VQYAQFPLTFGCGTKVEIKSGGGGQEVQLVES |
| | | | | GGGLVQPGGSLKLSCAASGFTFNKYAMNWVR |
| | | | | QAPGKGMEWVARIRSKYNNYATYYADAVKD |
| | | | | RFTISRDDSKNTLYLQMNNLKTEDTAVYYCVR |
| | | | | AGNFGSSYISYFAYWGQGTLVTVSSGGGGQGG |
| | | | | GGQGGGGQQTVVTQEPSLTVSPGGTVTITCGS |
| | | | | STGAVTSGNYPNWIQKKPGQAPRGLIGGTKFL |
| | | | | APGTPARFSGSLEGGKAALTLSGVQPEDEAEY |
| | | | | YCVLYYSNRWVFGSGTKLTVLGGGGCPPCPAP |
| | | | | ELLGGPSVFLFPPKPKDTLMISRTPEVTCVVVD |
| | | | | VSHEEPEVKFNWYVDGVEVHNAKTKPCEEQY |
| | | | | GSTYRCVSVLTVLHQDWLNGKEYKCKVSNKA |
| | | | | LPAPIEKTISKAKGQPREPQVYTLPPSREEMTK |
| | | | | NQVSLTCLVKGFYPSDIAVEWESNGQPENNYK |
| | | | | TTPPVLDSDGSFFLYSKLTVDKSRWQQGNVFS |
| | | | | CSVMHEALHNHYTQKSLSLSPGKGGGGQGGG |
| | | | | GQGGGGQGGGGQGGGGQGGGGQCPPCPAPEL |
| | | | | LGGPSVFLFPPKPKDTLMISRTPEVTCVVVDVS |
| | | | | HEEPEVKFNWYVDGVEVHNAKTKPCEEQYGS |
| | | | | TYRCVSVLTVLHQDWLNGKEYKCKVSNKALP |
| | | | | APIEKTISKAKGQPREPQVYTLPPSREEMTKNQ |
| | | | | VSLTCLVKGFYPSDIAVEWESNGQPENNYKTT |
| | | | | PPVLDSDGSFFLYSKLTVDKSRWQQGNVFSCS |
| | | | | VMHEALHNHYTQKSLSLSPGKGGGGQVQLQE |
| | | | | SGPGLVKPSETLSLTCTVSGGSISSSSYFWGWIR |
| | | | | QPPGKCLEWIGNIYYSGSSNYNPSLKSRVTISV |
| | | | | DTSKNQFSLKLSSVTAADTAVYYCARLPRGDR |
| | | | | DAFDIWGQGTMVTVSSGGGGQGGGGQGGGG |
| | | | | QDIVMTQSPSSLSASVGDRVTITCRASQGISNY |
| | | | | LAWYQQKPGKVPKLLIYAASTLQSGVPSRFSG |
| | | | | SGSGTDFTLTISSLQPEDFATYYCQQSYSTPFTF |
| | | | | GCGTKVEIKSGGGGQEVQLVESGGGLVQPGGS |
| | | | | LKLSCAASGFTFNKYAMNWVRQAPGKGMEW |
| | | | | VARIRSKYNNYATYYADAVKDRFTISRDDSKN |
| | | | | TLYLQMNNLKTEDTAVYYCVRAGNFGSSYISY |
| | | | | FAYWGQGTLVTVSSGGGGQGGGGQGGGGQQ |
| | | | | TVVTQEPSLTVSPGGTVTITCGSSTGAVTSGNY |
| | | | | PNWIQKKPGQAPRGLIGGTKFLAPGTPARFSGS |
| | | | | LEGGKAALTLSGVQPEDEAEYYCVLYYSNRW |
| | | | | VFGSGTKLTVL |
| 252. | CH3 15-E11 CC x | artificial | aa | QVQLVQSGAEVKKPGASVKVSCKASGYTFTN |
| | I2L x G4 x scFc x | | | YWMNWVRQAPGQCLEWMGNIAYGVKGTNY |
| | G4 x MS 15-B12 | | | NQKFQGRVTMTVDTSSSTAYMELSRLRSDDTA |
| | CC x I2L - Full | | | VYYCATRYFYVMDYWGQGTLVTVSSGGGGS |
| | Sequence | | | GGGGSGGGGSDIQMTQSPSSLSASVGDRVTITC |
| | | | | RASQDISNYLNWYQQKPGKVPKLLIYYTSRLH |
| | | | | SGVPSRFSGSGSGTDFTLTISSLQPEDVATYYCV |
| | | | | QYAQFPLTFGCGTKVEIKSGGGGSEVQLVESG |
| | | | | GGLVQPGGSLKLSCAASGFTFNKYAMNWVRQ |
| | | | | APGKGMEWVARIRSKYNNYATYYADAVKDR |
| | | | | FTISRDDSKNTLYLQMNNLKTEDTAVYYCVRA |
| | | | | GNFGSSYISYFAYWGQGTLVTVSSGGGGSGGG |
| | | | | GSGGGGSQTVVTQEPSLTVSPGGTVTITCGSST |
| | | | | GAVTSGNYPNWIQKKPGQAPRGLIGGTKFLAP |
| | | | | GTPARFSGSLEGGKAALTLSGVQPEDEAEYYC |
| | | | | VLYYSNRWVFGSGTKLTVLGGGGDKTHTCPP |
| | | | | CPAPELLGGPSVFLFPPKPKDTLMISRTPEVTCV |
| | | | | VVDVSHEDPEVKFNWYVDGVEVHNAKTKPCE |
| | | | | EQYGSTYRCVSVLTVLHQDWLNGKEYKCKVS |
| | | | | NKALPAPIEKTISKAKGQPREPQVYTLPPSREE |
| | | | | MTKNQVSLTCLVKGFYPSDIAVEWESNGQPEN |
| | | | | NYKTTPPVLDSDGSFFLYSKLTVDKSRWQQGN |
| | | | | VFSCSVMHEALHNHYTQKSLSLSPGKGGGGSG |
| | | | | GGGSGGGGSGGGGSGGGGSGGGGSDKTHTCP |
| | | | | PCPAPELLGGPSVFLFPPKPKDTLMISRTPEVTC |
| | | | | VVVDVSHEDPEVKFNWYVDGVEVHNAKTKPC |
| | | | | EEQYGSTYRCVSVLTVLHQDWLNGKEYKCKV |
| | | | | SNKALPAPIEKTISKAKGQPREPQVYTLPPSREE |
| | | | | MTKNQVSLTCLVKGFYPSDIAVEWESNGQPEN |
| | | | | NYKTTPPVLDSDGSFFLYSKLTVDKSRWQQGN |
| | | | | VFSCSVMHEALHNHYTQKSLSLSPGKGGGGQ |
| | | | | VQLQESGPGLVKPSETLSLTCTVSGGSISSSSYF |
| | | | | WGWIRQPPGKCLEWIGNIYYSGSSNYNPSLKS |
| | | | | RVTISVDTSKNQFSLKLSSVTAADTAVYYCAR |
| | | | | LPRGDRDAFDIWGQGTMVTVSSGGGGSGGGG |
| | | | | SGGGGSDIVMTQSPSSLSASVGDRVTITCRASQ |
| | | | | GISNYLAWYQQKPGKVPKLLIYAASTLQSGVP |
| | | | | SRFSGSGSGTDFTLTISSLQPEDFATYYCQQSYS |
| | | | | TPFTFGCGTKVEIKSGGGGSEVQLVESGGGLV |
| | | | | QPGGSLKLSCAASGFTFNKYAMNWVRQAPGK |
| | | | | GMEWVARIRSKYNNYATYYADAVKDRFTISR |
| | | | | DDSKNTLYLQMNNLKTEDTAVYYCVRAGNFG |
| | | | | SSYISYFAYWGQGTLVTVSSGGGGSGGGGSGG |
| | | | | GGSQTVVTQEPSLTVSPGGTVTITCGSSTGAVT |
| | | | | SGNYPNWIQKKPGQAPRGLIGGTKFLAPGTPA |
| | | | | RFSGSLEGGKAALTLSGVQPEDEAEYYCVLYY |
| | | | | SNRWVFGSGTKLTVL |
| 253. | CH3 15-E11 CC x | artificial | Aa | QVQLVQSGAEVKKPGASVKVSCKASGYTFTN |
| | I2L x G4S3 x scFc | | | YWMNWVRQAPGQCLEWMGNIAYGVKGTNY |
| | x G4S3 x MS 15- | | | NQKFQGRVTMTVDTSSSTAYMELSRLRSDDTA |
| | B12 CC x I2L - | | | VYYCATRYFYVMDYWGQGTLVTVSSGGGGS |
| | Full Sequence | | | GGGGSGGGGSDIQMTQSPSSLSASVGDRVTITC |
| | | | | RASQDISNYLNWYQQKPGKVPKLLIYYTSRLH |
| | | | | SGVPSRFSGSGSGTDFTLTISSLQPEDVATYYCV |
| | | | | QYAQFPLTFGCGTKVEIKSGGGGSEVQLVESG |
| | | | | GGLVQPGGSLKLSCAASGFTFNKYAMNWVRQ |
| | | | | APGKGMEWVARIRSKYNNYATYYADAVKDR |
| | | | | FTISRDDSKNTLYLQMNNLKTEDTAVYYCVRA |
| | | | | GNFGSSYISYFAYWGQGTLVTVSSGGGGSGGG |
| | | | | GSGGGGSQTVVTQEPSLTVSPGGTVTITCGSST |
| | | | | GAVTSGNYPNWIQKKPGQAPRGLIGGTKFLAP |
| | | | | GTPARFSGSLEGGKAALTLSGVQPEDEAEYYC |
| | | | | VLYYSNRWVFGSGTKLTVLGGGGSGGGGSGG |
| | | | | GGSDKTHTCPPCPAPELLGGPSVFLFPPKPKDT |
| | | | | LMISRTPEVTCVVVDVSHEDPEVKFNWYVDG |
| | | | | VEVHNAKTKPCEEQYGSTYRCVSVLTVLHQD |
| | | | | WLNGKEYKCKVSNKALPAPIEKTISKAKGQPR |
| | | | | EPQVYTLPPSREEMTKNQVSLTCLVKGFYPSDI |
| | | | | AVEWESNGQPENNYKTTPPVLDSDGSFFLYSK |
| | | | | LTVDKSRWQQGNVFSCSVMHEALHNHYTQKS |
| | | | | LSLSPGKGGGGSGGGGSGGGGSGGGGSGGGG |
| | | | | SGGGGSDKTHTCPPCPAPELLGGPSVFLFPPKP |
| | | | | KDTLMISRTPEVTCVVVDVSHEDPEVKFNWYV |
| | | | | DGVEVHNAKTKPCEEQYGSTYRCVSVLTVLH |
| | | | | QDWLNGKEYKCKVSNKALPAPIEKTISKAKGQ |
| | | | | PREPQVYTLPPSREEMTKNQVSLTCLVKGFYPS |
| | | | | DIAVEWESNGQPENNYKTTPPVLDSDGSFFLYS |
| | | | | KLTVDKSRWQQGNVFSCSVMHEALHNHYTQK |
| | | | | SLSLSPGKGGGGSGGGGSGGGGSQVQLQESGP |
| | | | | GLVKPSETLSLTCTVSGGSISSSSYFWGWIRQPP |
| | | | | GKCLEWIGNIYYSGSSNYNPSLKSRVTISVDTS |
| | | | | KNQFSLKLSSVTAADTAVYYCARLPRGDRDAF |
| | | | | DIWGQGTMVTVSSGGGGSGGGGSGGGGSDIV |
| | | | | MTQSPSSLSASVGDRVTITCRASQGISNYLAWY |
| | | | | QQKPGKVPKLLIYAASTLQSGVPSRFSGSGSGT |
| | | | | DFTLTISSLQPEDFATYYCQQSYSTPFTFGCGTK |
| | | | | VEIKSGGGGSEVQLVESGGGLVQPGGSLKLSC |
| | | | | AASGFTFNKYAMNWVRQAPGKGMEWVARIR |
| | | | | SKYNNYATYYADAVKDRFTISRDDSKNTLYLQ |
| | | | | MNNLKTEDTAVYYCVRAGNFGSSYISYFAYW |
| | | | | GQGTLVTVSSGGGGSGGGGSGGGGSQTVVTQ |
| | | | | EPSLTVSPGGTVTITCGSSTGAVTSGNYPNWIQ |
| | | | | KKPGQAPRGLIGGTKFLAPGTPARFSGSLEGGK |
| | | | | AALTLSGVQPEDEAEYYCVLYYSNRWVFGSG |
| | | | | TKLTVL |
| 254. | CH3 15-E11 CC x | artificial | Aa | QVQLVQSGAEVKKPGASVKVSCKASGYTFTN |
| | I2M2 x G4 x scfc | | | YWMNWVRQAPGQCLEWMGNIAYGVKGTNY |
| | x G4 x MS 15- | | | NQKFQGRVTMTVDTSSSTAYMELSRLRSDDTA |
| | B12 CC x I2M2 - | | | VYYCATRYFYVMDYWGQGTLVTVSSGGGGS |
| | Full Sequence | | | GGGGSGGGGSDIQMTQSPSSLSASVGDRVTITC |
| | | | | RASQDISNYLNWYQQKPGKVPKLLIYYTSRLH |
| | | | | SGVPSRFSGSGSGTDFTLTISSLQPEDVATYYCV |
| | | | | QYAQFPLTFGCGTKVEIKSGGGGSEVQLVESG |
| | | | | GGLVQPGGSLKLSCAASGFTFNKYAINWVREA |
| | | | | PGKGLEWVARIRSKYNNYATYYADAVKDRFTI |
| | | | | SRDDSKNTAYLQMNNLKTEDTAVYYCVRNAN |
| | | | | FGTSYISYFAYWGQGTLVTVSSGGGGSGGGGS |
| | | | | GGGGSQTVVTQEPSLTVSPGGTVTLTCGSSTG |
| | | | | AVTSGNYPNWVQKKPGQAPRGLIGGTKFLAPG |
| | | | | TPARFSGSLLGGKAALTLSGVQPEDEAEYYCV |
| | | | | LWYSNRWVFGSGTKLTVLGGGGDKTHTCPPC |
| | | | | PAPELLGGPSVFLFPPKPKDTLMISRTPEVTCVV |
| | | | | VDVSHEDPEVKFNWYVDGVEVHNAKTKPCEE |
| | | | | QYGSTYRCVSVLTVLHQDWLNGKEYKCKVSN |
| | | | | KALPAPIEKTISKAKGQPREPQVYTLPPSREEM |
| | | | | TKNQVSLTCLVKGFYPSDIAVEWESNGQPENN |
| | | | | YKTTPPVLDSDGSFFLYSKLTVDKSRWQQGNV |
| | | | | FSCSVMHEALHNHYTQKSLSLSPGKGGGGSGG |
| | | | | GGSGGGGSGGGGSGGGGSGGGGSDKTHTCPP |
| | | | | CPAPELLGGPSVFLFPPKPKDTLMISRTPEVTCV |
| | | | | VVDVSHEDPEVKFNWYVDGVEVHNAKTKPCE |
| | | | | EQYGSTYRCVSVLTVLHQDWLNGKEYKCKVS |
| | | | | NKALPAPIEKTISKAKGQPREPQVYTLPPSREE |
| | | | | MTKNQVSLTCLVKGFYPSDIAVEWESNGQPEN |
| | | | | NYKTTPPVLDSDGSFFLYSKLTVDKSRWQQGN |
| | | | | VFSCSVMHEALHNHYTQKSLSLSPGKGGGGQ |
| | | | | VQLQESGPGLVKPSETLSLTCTVSGGSISSSSYF |
| | | | | WGWIRQPPGKCLEWIGNIYYSGSSNYNPSLKS |
| | | | | RVTISVDTSKNQFSLKLSSVTAADTAVYYCAR |
| | | | | LPRGDRDAFDIWGQGTMVTVSSGGGGSGGGG |
| | | | | SGGGGSDIVMTQSPSSLSASVGDRVTITCRASQ |
| | | | | GISNYLAWYQQKPGKVPKLLIYAASTLQSGVP |
| | | | | SRFSGSGSGTDFTLTISSLQPEDFATYYCQQSYS |
| | | | | TPFTFGCGTKVEIKSGGGGSEVQLVESGGGLV |
| | | | | QPGGSLKLSCAASGFTFNKYAINWVREAPGKG |
| | | | | LEWVARIRSKYNNYATYYADAVKDRFTISRDD |
| | | | | SKNTAYLQMNNLKTEDTAVYYCVRNANFGTS |
| | | | | YISYFAYWGQGTLVTVSSGGGGSGGGGSGGG |
| | | | | GSQTVVTQEPSLTVSPGGTVTLTCGSSTGAVTS |
| | | | | GNYPNWVQKKPGQAPRGLIGGTKFLAPGTPAR |
| | | | | FSGSLLGGKAALTLSGVQPEDEAEYYCVLWYS |
| | | | | NRWVFGSGTKLTVL |
| 255. | CH3 15-E11 CC x | artificial | Aa | QVQLVQSGAEVKKPGASVKVSCKASGYTFTN |
| | I2M2 x (G4Q)3x | | | YWMNWVRQAPGQCLEWMGNIAYGVKGTNY |
| | scFcmod x | | | NQKFQGRVTMTVDTSSSTAYMELSRLRSDDTA |
| | (G4Q)3 x MS 15- | | | VYYCATRYFYVMDYWGQGTLVTVSSGGGGQ |
| | B12 CC x I2M2 - | | | GGGGQGGGGQDIQMTQSPSSLSASVGDRVTIT |
| | Full Sequence | | | CRASQDISNYLNWYQQKPGKVPKLLIYYTSRL |
| | | | | HSGVPSRFSGSGSGTDFTLTISSLQPEDVATYYC |
| | | | | VQYAQFPLTFGCGTKVEIKSGGGGQEVQLVES |
| | | | | GGGLVQPGGSLKLSCAASGFTFNKYAINWVRE |
| | | | | APGKGLEWVARIRSKYNNYATYYADAVKDRF |
| | | | | TISRDDSKNTAYLQMNNLKTEDTAVYYCVRN |
| | | | | ANFGTSYISYFAYWGQGTLVTVSSGGGGQGG |
| | | | | GGQGGGGQQTVVTQEPSLTVSPGGTVTLTCGS |
| | | | | STGAVTSGNYPNWVQKKPGQAPRGLIGGTKFL |
| | | | | APGTPARFSGSLLGGKAALTLSGVQPEDEAEY |
| | | | | YCVLWYSNRWVFGSGTKLTVLGGGGQGGGG |
| | | | | QGGGGQCPPCPAPELLGGPSVFLFPPKPKDTLM |
| | | | | ISRTPEVTCVVVDVSHEEPEVKFNWYVDGVEV |
| | | | | HNAKTKPCEEQYGSTYRCVSVLTVLHQDWLN |
| | | | | GKEYKCKVSNKALPAPIEKTISKAKGQPREPQV |
| | | | | YTLPPSREEMTKNQVSLTCLVKGFYPSDIAVE |
| | | | | WESNGQPENNYKTTPPVLDSDGSFFLYSKLTV |
| | | | | DKSRWQQGNVFSCSVMHEALHNHYTQKSLSL |
| | | | | SPGKGGGGQGGGGQGGGGQGGGGQGGGGQG |
| | | | | GGGQCPPCPAPELLGGPSVFLFPPKPKDTLMIS |
| | | | | RTPEVTCVVVDVSHEEPEVKFNWYVDGVEVH |
| | | | | NAKTKPCEEQYGSTYRCVSVLTVLHQDWLNG |
| | | | | KEYKCKVSNKALPAPIEKTISKAKGQPREPQVY |
| | | | | TLPPSREEMTKNQVSLTCLVKGFYPSDIAVEWE |
| | | | | SNGQPENNYKTTPPVLDSDGSFFLYSKLTVDKS |
| | | | | RWQQGNVFSCSVMHEALHNHYTQKSLSLSPG |
| | | | | KGGGGQGGGGQGGGGQQVQLQESGPGLVKPS |
| | | | | ETLSLTCTVSGGSISSSSYFWGWIRQPPGKCLE |
| | | | | WIGNIYYSGSSNYNPSLKSRVTISVDTSKNQFSL |
| | | | | KLSSVTAADTAVYYCARLPRGDRDAFDIWGQ |
| | | | | GTMVTVSSGGGGQGGGGQGGGGQDIVMTQSP |
| | | | | SSLSASVGDRVTITCRASQGISNYLAWYQQKP |
| | | | | GKVPKLLIYAASTLQSGVPSRFSGSGSGTDFTL |
| | | | | TISSLQPEDFATYYCQQSYSTPFTFGCGTKVEIK |
| | | | | SGGGGQEVQLVESGGGLVQPGGSLKLSCAASG |
| | | | | FTFNKYAINWVREAPGKGLEWVARIRSKYNN |
| | | | | YATYYADAVKDRFTISRDDSKNTAYLQMNNL |
| | | | | KTEDTAVYYCVRNANFGTSYISYFAYWGQGT |
| | | | | LVTVSSGGGGQGGGGQGGGGQQTVVTQEPSL |
| | | | | TVSPGGTVTLTCGSSTGAVTSGNYPNWVQKKP |
| | | | | GQAPRGLIGGTKFLAPGTPARFSGSLLGGKAAL |
| | | | | TLSGVQPEDEAEYYCVLWYSNRWVFGSGTKL |
| | | | | TVL |
| 256. | CH3 15-E11 CC x | artificial | Aa | QVQLVQSGAEVKKPGASVKVSCKASGYTFTN |
| | I2M2 x G4S3 x | | | YWMNWVRQAPGQCLEWMGNIAYGVKGTNY |
| | scFc x G4S3 x MS | | | NQKFQGRVTMTVDTSSSTAYMELSRLRSDDTA |
| | 15-B12 CC x | | | VYYCATRYFYVMDYWGQGTLVTVSSGGGGS |
| | I2M2 - Full | | | GGGGSGGGGSDIQMTQSPSSLSASVGDRVTITC |
| | Sequence | | | RASQDISNYLNWYQQKPGKVPKLLIYYTSRLH |
| | | | | SGVPSRFSGSGSGTDFTLTISSLQPEDVATYYCV |
| | | | | QYAQFPLTFGCGTKVEIKSGGGGSEVQLVESG |
| | | | | GGLVQPGGSLKLSCAASGFTFNKYAINWVREA |
| | | | | PGKGLEWVARIRSKYNNYATYYADAVKDRFTI |
| | | | | SRDDSKNTAYLQMNNLKTEDTAVYYCVRNAN |
| | | | | FGTSYISYFAYWGQGTLVTVSSGGGGSGGGGS |
| | | | | GGGGSQTVVTQEPSLTVSPGGTVTLTCGSSTG |
| | | | | AVTSGNYPNWVQKKPGQAPRGLIGGTKFLAPG |
| | | | | TPARFSGSLLGGKAALTLSGVQPEDEAEYYCV |
| | | | | LWYSNRWVFGSGTKLTVLGGGGSGGGGSGGG |
| | | | | GSDKTHTCPPCPAPELLGGPSVFLFPPKPKDTL |
| | | | | MISRTPEVTCVVVDVSHEDPEVKFNWYVDGV |
| | | | | EVHNAKTKPCEEQYGSTYRCVSVLTVLHQDW |
| | | | | LNGKEYKCKVSNKALPAPIEKTISKAKGQPREP |
| | | | | QVYTLPPSREEMTKNQVSLTCLVKGFYPSDIAV |
| | | | | EWESNGQPENNYKTTPPVLDSDGSFFLYSKLT |
| | | | | VDKSRWQQGNVFSCSVMHEALHNHYTQKSLS |
| | | | | LSPGKGGGGSGGGGSGGGGSGGGGSGGGGSG |
| | | | | GGGSDKTHTCPPCPAPELLGGPSVFLFPPKPKD |
| | | | | TLMISRTPEVTCVVVDVSHEDPEVKFNWYVDG |
| | | | | VEVHNAKTKPCEEQYGSTYRCVSVLTVLHQD |
| | | | | WLNGKEYKCKVSNKALPAPIEKTISKAKGQPR |
| | | | | EPQVYTLPPSREEMTKNQVSLTCLVKGFYPSDI |
| | | | | AVEWESNGQPENNYKTTPPVLDSDGSFFLYSK |
| | | | | LTVDKSRWQQGNVFSCSVMHEALHNHYTQKS |
| | | | | LSLSPGKGGGGSGGGGSGGGGSQVQLQESGPG |
| | | | | LVKPSETLSLTCTVSGGSISSSSYFWGWIRQPPG |
| | | | | KCLEWIGNIYYSGSSNYNPSLKSRVTISVDTSK |
| | | | | NQFSLKLSSVTAADTAVYYCARLPRGDRDAFD |
| | | | | IWGQGTMVTVSSGGGGSGGGGSGGGGSDIVM |
| | | | | TQSPSSLSASVGDRVTITCRASQGISNYLAWYQ |
| | | | | QKPGKVPKLLIYAASTLQSGVPSRFSGSGSGTD |
| | | | | FTLTISSLQPEDFATYYCQQSYSTPFTFGCGTKV |
| | | | | EIKSGGGGSEVQLVESGGGLVQPGGSLKLSCA |
| | | | | ASGFTFNKYAINWVREAPGKGLEWVARIRSKY |
| | | | | NNYATYYADAVKDRFTISRDDSKNTAYLQMN |
| | | | | NLKTEDTAVYYCVRNANFGTSYISYFAYWGQ |
| | | | | GTLVTVSSGGGGSGGGGSGGGGSQTVVTQEPS |
| | | | | LTVSPGGTVTLTCGSSTGAVTSGNYPNWVQKK |
| | | | | PGQAPRGLIGGTKFLAPGTPARFSGSLLGGKAA |
| | | | | LTLSGVQPEDEAEYYCVLWYSNRWVFGSGTK |
| | | | | LTVL |
| 257. | CH3 15-E11 CC x | artificial | Aa | QVQLVQSGAEVKKPGASVKVSCKASGYTFTN |
| | I2M2 x G4 x scFc | | | YWMNWVRQAPGQCLEWMGNIAYGVKGTNY |
| | x G4 x MS 15- | | | NQKFQGRVTMTVDTSSSTAYMELSRLRSDDTA |
| | B12 CC x I2M2 | | | VYYCATRYFYVMDYWGQGTLVTVSSGGGGQ |
| | _GQ - Full | | | GGGGQGGGGQDIQMTQSPSSLSASVGDRVTIT |
| | Sequence | | | CRASQDISNYLNWYQQKPGKVPKLLIYYTSRL |
| | | | | HSGVPSRFSGSGSGTDFTLTISSLQPEDVATYYC |
| | | | | VQYAQFPLTFGCGTKVEIKSGGGGQEVQLVES |
| | | | | GGGLVQPGGSLKLSCAASGFTFNKYAINWVRE |
| | | | | APGKGLEWVARIRSKYNNYATYYADAVKDRF |
| | | | | TISRDDSKNTAYLQMNNLKTEDTAVYYCVRN |
| | | | | ANFGTSYISYFAYWGQGTLVTVSSGGGGQGG |
| | | | | GGQGGGGQQTVVTQEPSLTVSPGGTVTLTCGS |
| | | | | STGAVTSGNYPNWVQKKPGQAPRGLIGGTKFL |
| | | | | APGTPARFSGSLLGGKAALTLSGVQPEDEAEY |
| | | | | YCVLWYSNRWVFGSGTKLTVLGGGGCPPCPA |
| | | | | PELLGGPSVFLFPPKPKDTLMISRTPEVTCVVV |
| | | | | DVSHEEPEVKFNWYVDGVEVHNAKTKPCEEQ |
| | | | | YGSTYRCVSVLTVLHQDWLNGKEYKCKVSNK |
| | | | | ALPAPIEKTISKAKGQPREPQVYTLPPSREEMT |
| | | | | KNQVSLTCLVKGFYPSDIAVEWESNGQPENNY |
| | | | | KTTPPVLDSDGSFFLYSKLTVDKSRWQQGNVF |
| | | | | SCSVMHEALHNHYTQKSLSLSPGKGGGGQGG |
| | | | | GGQGGGGQGGGGQGGGGQGGGGQCPPCPAP |
| | | | | ELLGGPSVFLFPPKPKDTLMISRTPEVTCVVVD |
| | | | | VSHEEPEVKFNWYVDGVEVHNAKTKPCEEQY |
| | | | | GSTYRCVSVLTVLHQDWLNGKEYKCKVSNKA |
| | | | | LPAPIEKTISKAKGQPREPQVYTLPPSREEMTK |
| | | | | NQVSLTCLVKGFYPSDIAVEWESNGQPENNYK |
| | | | | TTPPVLDSDGSFFLYSKLTVDKSRWQQGNVFS |
| | | | | CSVMHEALHNHYTQKSLSLSPGKGGGGQVQL |
| | | | | QESGPGLVKPSETLSLTCTVSGGSISSSSYFWG |
| | | | | WIRQPPGKCLEWIGNIYYSGSSNYNPSLKSRVT |
| | | | | ISVDTSKNQFSLKLSSVTAADTAVYYCARLPRG |
| | | | | DRDAFDIWGQGTMVTVSSGGGGQGGGGQGG |
| | | | | GGQDIVMTQSPSSLSASVGDRVTITCRASQGIS |
| | | | | NYLAWYQQKPGKVPKLLIYAASTLQSGVPSRF |
| | | | | SGSGSGTDFTLTISSLQPEDFATYYCQQSYSTPF |
| | | | | TFGCGTKVEIKSGGGGQEVQLVESGGGLVQPG |
| | | | | GSLKLSCAASGFTFNKYAINWVREAPGKGLEW |
| | | | | VARIRSKYNNYATYYADAVKDRFTISRDDSKN |
| | | | | TAYLQMNNLKTEDTAVYYCVRNANFGTSYIS |
| | | | | YFAYWGQGTLVTVSSGGGGQGGGGQGGGGQ |
| | | | | QTVVTQEPSLTVSPGGTVTLTCGSSTGAVTSGN |
| | | | | YPNWVQKKPGQAPRGLIGGTKFLAPGTPARFS |
| | | | | GSLLGGKAALTLSGVQPEDEAEYYCVLWYSN |
| | | | | RWVFGSGTKLTVL |
| 258. | CH3 15-E11 CCx | artificial | Aa | QVQLVQSGAEVKKPGASVKVSCKASGYTFTN |
| | I2C 44/100cc x | | | YWMNWVRQAPGQCLEWMGNIAYGVKGTNY |
| | scFc x MS 15-B12 | | | NQKFQGRVTMTVDTSSSTAYMELSRLRSDDTA |
| | CC x I2C | | | VYYCATRYFYVMDYWGQGTLVTVSSGGGGS |
| | 44/100cc0 - Full | | | GGGGSGGGGSDIQMTQSPSSLSASVGDRVTITC |
| | Sequence | | | RASQDISNYLNWYQQKPGKVPKLLIYYTSRLH |
| | | | | SGVPSRFSGSGSGTDFTLTISSLQPEDVATYYCV |
| | | | | QYAQFPLTFGCGTKVEIKSGGGGSEVQLVESG |
| | | | | GGLVQPGGSLKLSCAASGFTFNKYAMNWVRQ |
| | | | | APGKCLEWVARIRSKYNNYATYYADSVKDRF |
| | | | | TISRDDSKNTAYLQMNNLKTEDTAVYYCVRH |
| | | | | GNFGNSYISYWAYWGQGTLVTVSSGGGGSGG |
| | | | | GGSGGGGSQTVVTQEPSLTVSPGGTVTLTCGSS |
| | | | | TGAVTSGNYPNWVQQKPGQAPRGLIGGTKFL |
| | | | | APGTPARFSGSLLGGKAALTLSGVQPEDEAEY |
| | | | | YCVLWYSNRWVFGCGTKLTVLGGGGSGGGGS |
| | | | | GGGGSDKTHTCPPCPAPELLGGPSVFLFPPKPK |
| | | | | DTLMISRTPEVTCVVVDVSHEDPEVKFNWYVD |
| | | | | GVEVHNAKTKPCEEQYGSTYRCVSVLTVLHQ |
| | | | | DWLNGKEYKCKVSNKALPAPIEKTISKAKGQP |
| | | | | REPQVYTLPPSREEMTKNQVSLTCLVKGFYPS |
| | | | | DIAVEWESNGQPENNYKTTPPVLDSDGSFFLYS |
| | | | | KLTVDKSRWQQGNVFSCSVMHEALHNHYTQK |
| | | | | SLSLSPGKGGGGSGGGGSGGGGSGGGGSGGG |
| | | | | GSGGGGSDKTHTCPPCPAPELLGGPSVFLFPPK |
| | | | | PKDTLMISRTPEVTCVVVDVSHEDPEVKFNWY |
| | | | | VDGVEVHNAKTKPCEEQYGSTYRCVSVLTVL |
| | | | | HQDWLNGKEYKCKVSNKALPAPIEKTISKAKG |
| | | | | QPREPQVYTLPPSREEMTKNQVSLTCLVKGFY |
| | | | | PSDIAVEWESNGQPENNYKTTPPVLDSDGSFFL |
| | | | | YSKLTVDKSRWQQGNVFSCSVMHEALHNHYT |
| | | | | QKSLSLSPGKGGGGSGGGGSGGGGSQVQLQES |
| | | | | GPGLVKPSETLSLTCTVSGGSISSSSYFWGWIR |
| | | | | QPPGKCLEWIGNIYYSGSSNYNPSLKSRVTISV |
| | | | | DTSKNQFSLKLSSVTAADTAVYYCARLPRGDR |
| | | | | DAFDIWGQGTMVTVSSGGGGSGGGGSGGGGS |
| | | | | DIVMTQSPSSLSASVGDRVTITCRASQGISNYL |
| | | | | AWYQQKPGKVPKLLIYAASTLQSGVPSRFSGS |
| | | | | GSGTDFTLTISSLQPEDFATYYCQQSYSTPFTFG |
| | | | | CGTKVEIKSGGGGSEVQLVESGGGLVQPGGSL |
| | | | | KLSCAASGFTFNKYAMNWVRQAPGKCLEWV |
| | | | | ARIRSKYNNYATYYADSVKDRFTISRDDSKNT |
| | | | | AYLQMNNLKTEDTAVYYCVRHGNFGNSYISY |
| | | | | WAYWGQGTLVTVSSGGGGSGGGGSGGGGSQ |
| | | | | TVVTQEPSLTVSPGGTVTLTCGSSTGAVTSGNY |
| | | | | PNWVQQKPGQAPRGLIGGTKFLAPGTPARFSG |
| | | | | SLLGGKAALTLSGVQPEDEAEYYCVLWYSNR |
| | | | | WVFGCGTKLTVL |
| 259. | CH3 24-D7 CC x | artificial | Aa | QVQLVQSGAEVKKPGASVKVSCKASGYTFTN |
| | I2L x G4S3 x | | | YWMNWVRQAPGQCLEWMGNIHSKAHGTNY |
| | scFc x G4S3 x MS | | | NQKFQGRVTMTVDTSSSTAYMELSRLRSDDTA |
| | 15-B12 CC x I2L - | | | VYYCATRYFYVMDYWGQGTLVTVSSGGGGS |
| | Full Sequence | | | GGGGSGGGGSDIQMTQSPSSLSASVGDRVTITC |
| | | | | RASQDISNYLNWYQQKPGKVPKLLIYYTSRLH |
| | | | | SGVPSRFSGSGSGTDFTLTISSLQPEDVATYYCV |
| | | | | QYAQFPLTFGCGTKVEIKSGGGGSEVQLVESG |
| | | | | GGLVQPGGSLKLSCAASGFTFNKYAMNWVRQ |
| | | | | APGKGMEWVARIRSKYNNYATYYADAVKDR |
| | | | | FTISRDDSKNTLYLQMNNLKTEDTAVYYCVRA |
| | | | | GNFGSSYISYFAYWGQGTLVTVSSGGGGSGGG |
| | | | | GSGGGGSQTVVTQEPSLTVSPGGTVTITCGSST |
| | | | | GAVTSGNYPNWIQKKPGQAPRGLIGGTKFLAP |
| | | | | GTPARFSGSLEGGKAALTLSGVQPEDEAEYYC |
| | | | | VLYYSNRWVFGSGTKLTVLGGGGSGGGGSGG |
| | | | | GGSDKTHTCPPCPAPELLGGPSVFLFPPKPKDT |
| | | | | LMISRTPEVTCVVVDVSHEDPEVKFNWYVDG |
| | | | | VEVHNAKTKPCEEQYGSTYRCVSVLTVLHQD |
| | | | | WLNGKEYKCKVSNKALPAPIEKTISKAKGQPR |
| | | | | EPQVYTLPPSREEMTKNQVSLTCLVKGFYPSDI |
| | | | | AVEWESNGQPENNYKTTPPVLDSDGSFFLYSK |
| | | | | LTVDKSRWQQGNVFSCSVMHEALHNHYTQKS |
| | | | | LSLSPGKGGGGSGGGGSGGGGSGGGGSGGGG |
| | | | | SGGGGSDKTHTCPPCPAPELLGGPSVFLFPPKP |
| | | | | KDTLMISRTPEVTCVVVDVSHEDPEVKFNWYV |
| | | | | DGVEVHNAKTKPCEEQYGSTYRCVSVLTVLH |
| | | | | QDWLNGKEYKCKVSNKALPAPIEKTISKAKGQ |
| | | | | PREPQVYTLPPSREEMTKNQVSLTCLVKGFYPS |
| | | | | DIAVEWESNGQPENNYKTTPPVLDSDGSFFLYS |
| | | | | KLTVDKSRWQQGNVFSCSVMHEALHNHYTQK |
| | | | | SLSLSPGKGGGGSGGGGSGGGGSQVQLQESGP |
| | | | | GLVKPSETLSLTCTVSGGSISSSSYFWGWIRQPP |
| | | | | GKCLEWIGNIYYSGSSNYNPSLKSRVTISVDTS |
| | | | | KNQFSLKLSSVTAADTAVYYCARLPRGDRDAF |
| | | | | DIWGQGTMVTVSSGGGGSGGGGSGGGGSDIV |
| | | | | MTQSPSSLSASVGDRVTITCRASQGISNYLAWY |
| | | | | QQKPGKVPKLLIYAASTLQSGVPSRFSGSGSGT |
| | | | | DFTLTISSLQPEDFATYYCQQSYSTPFTFGCGTK |
| | | | | VEIKSGGGGSEVQLVESGGGLVQPGGSLKLSC |
| | | | | AASGFTFNKYAMNWVRQAPGKGMEWVARIR |
| | | | | SKYNNYATYYADAVKDRFTISRDDSKNTLYLQ |
| | | | | MNNLKTEDTAVYYCVRAGNFGSSYISYFAYW |
| | | | | GQGTLVTVSSGGGGSGGGGSGGGGSQTVVTQ |
| | | | | EPSLTVSPGGTVTITCGSSTGAVTSGNYPNWIQ |
| | | | | KKPGQAPRGLIGGTKFLAPGTPARFSGSLEGGK |
| | | | | AALTLSGVQPEDEAEYYCVLYYSNRWVFGSG |
| | | | | TKLTVL |
| 260. | CH3 24-D7 CC x | artificial | Aa | QVQLVQSGAEVKKPGASVKVSCKASGYTFTN |
| | I2L x G4 x scFc x | | | YWMNWVRQAPGQCLEWMGNIHSKAHGTNY |
| | G4 x MS15-B12 | | | NQKFQGRVTMTVDTSSSTAYMELSRLRSDDTA |
| | CC x I2L_GQ - | | | VYYCATRYFYVMDYWGQGTLVTVSSGGGGQ |
| | Full Sequence | | | GGGGQGGGGQDIQMTQSPSSLSASVGDRVTIT |
| | | | | CRASQDISNYLNWYQQKPGKVPKLLIYYTSRL |
| | | | | HSGVPSRFSGSGSGTDFTLTISSLQPEDVATYYC |
| | | | | VQYAQFPLTFGCGTKVEIKSGGGGQEVQLVES |
| | | | | GGGLVQPGGSLKLSCAASGFTFNKYAMNWVR |
| | | | | QAPGKGMEWVARIRSKYNNYATYYADAVKD |
| | | | | RFTISRDDSKNTLYLQMNNLKTEDTAVYYCVR |
| | | | | AGNFGSSYISYFAYWGQGTLVTVSSGGGGQGG |
| | | | | GGQGGGGQQTVVTQEPSLTVSPGGTVTITCGS |
| | | | | STGAVTSGNYPNWIQKKPGQAPRGLIGGTKFL |
| | | | | APGTPARFSGSLEGGKAALTLSGVQPEDEAEY |
| | | | | YCVLYYSNRWVFGSGTKLTVLGGGGCPPCPAP |
| | | | | ELLGGPSVFLFPPKPKDTLMISRTPEVTCVVVD |
| | | | | VSHEEPEVKFNWYVDGVEVHNAKTKPCEEQY |
| | | | | GSTYRCVSVLTVLHQDWLNGKEYKCKVSNKA |
| | | | | LPAPIEKTISKAKGQPREPQVYTLPPSREEMTK |
| | | | | NQVSLTCLVKGFYPSDIAVEWESNGQPENNYK |
| | | | | TTPPVLDSDGSFFLYSKLTVDKSRWQQGNVFS |
| | | | | CSVMHEALHNHYTQKSLSLSPGKGGGGQGGG |
| | | | | GQGGGGQGGGGQGGGGQGGGGQCPPCPAPEL |
| | | | | LGGPSVFLFPPKPKDTLMISRTPEVTCVVVDVS |
| | | | | HEEPEVKFNWYVDGVEVHNAKTKPCEEQYGS |
| | | | | TYRCVSVLTVLHQDWLNGKEYKCKVSNKALP |
| | | | | APIEKTISKAKGQPREPQVYTLPPSREEMTKNQ |
| | | | | VSLTCLVKGFYPSDIAVEWESNGQPENNYKTT |
| | | | | PPVLDSDGSFFLYSKLTVDKSRWQQGNVFSCS |
| | | | | VMHEALHNHYTQKSLSLSPGKGGGGQVQLQE |
| | | | | SGPGLVKPSETLSLTCTVSGGSISSSSYFWGWIR |
| | | | | QPPGKCLEWIGNIYYSGSSNYNPSLKSRVTISV |
| | | | | DTSKNQFSLKLSSVTAADTAVYYCARLPRGDR |
| | | | | DAFDIWGQGTMVTVSSGGGGQGGGGQGGGG |
| | | | | QDIVMTQSPSSLSASVGDRVTITCRASQGISNY |
| | | | | LAWYQQKPGKVPKLLIYAASTLQSGVPSRFSG |
| | | | | SGSGTDFTLTISSLQPEDFATYYCQQSYSTPFTF |
| | | | | GCGTKVEIKSGGGGQEVQLVESGGGLVQPGGS |
| | | | | LKLSCAASGFTFNKYAMNWVRQAPGKGMEW |
| | | | | VARIRSKYNNYATYYADAVKDRFTISRDDSKN |
| | | | | TLYLQMNNLKTEDTAVYYCVRAGNFGSSYISY |
| | | | | FAYWGQGTLVTVSSGGGGQGGGGQGGGGQQ |
| | | | | TVVTQEPSLTVSPGGTVTITCGSSTGAVTSGNY |
| | | | | PNWIQKKPGQAPRGLIGGTKFLAPGTPARFSGS |
| | | | | LEGGKAALTLSGVQPEDEAEYYCVLYYSNRW |
| | | | | VFGSGTKLTVL |
| 261. | CH3 24-D7 CC x | artificial | Aa | QVQLVQSGAEVKKPGASVKVSCKASGYTFTN |
| | I2M2 x G4 x scfc | | | YWMNWVRQAPGQCLEWMGNIHSKAHGTNY |
| | x G4 x MS 15- | | | NQKFQGRVTMTVDTSSSTAYMELSRLRSDDTA |
| | B12 CC x I2M2 - | | | VYYCATRYFYVMDYWGQGTLVTVSSGGGGS |
| | Full Sequence | | | GGGGSGGGGSDIQMTQSPSSLSASVGDRVTITC |
| | | | | RASQDISNYLNWYQQKPGKVPKLLIYYTSRLH |
| | | | | SGVPSRFSGSGSGTDFTLTISSLQPEDVATYYCV |
| | | | | QYAQFPLTFGCGTKVEIKSGGGGSEVQLVESG |
| | | | | GGLVQPGGSLKLSCAASGFTFNKYAINWVREA |
| | | | | PGKGLEWVARIRSKYNNYATYYADAVKDRFTI |
| | | | | SRDDSKNTAYLQMNNLKTEDTAVYYCVRNAN |
| | | | | FGTSYISYFAYWGQGTLVTVSSGGGGSGGGGS |
| | | | | GGGGSQTVVTQEPSLTVSPGGTVTLTCGSSTG |
| | | | | AVTSGNYPNWVQKKPGQAPRGLIGGTKFLAPG |
| | | | | TPARFSGSLLGGKAALTLSGVQPEDEAEYYCV |
| | | | | LWYSNRWVFGSGTKLTVLGGGGDKTHTCPPC |
| | | | | PAPELLGGPSVFLFPPKPKDTLMISRTPEVTCVV |
| | | | | VDVSHEDPEVKFNWYVDGVEVHNAKTKPCEE |
| | | | | QYGSTYRCVSVLTVLHQDWLNGKEYKCKVSN |
| | | | | KALPAPIEKTISKAKGQPREPQVYTLPPSREEM |
| | | | | TKNQVSLTCLVKGFYPSDIAVEWESNGQPENN |
| | | | | YKTTPPVLDSDGSFFLYSKLTVDKSRWQQGNV |
| | | | | FSCSVMHEALHNHYTQKSLSLSPGKGGGGSGG |
| | | | | GGSGGGGSGGGGSGGGGSGGGGSDKTHTCPP |
| | | | | CPAPELLGGPSVFLFPPKPKDTLMISRTPEVTCV |
| | | | | VVDVSHEDPEVKFNWYVDGVEVHNAKTKPCE |
| | | | | EQYGSTYRCVSVLTVLHQDWLNGKEYKCKVS |
| | | | | NKALPAPIEKTISKAKGQPREPQVYTLPPSREE |
| | | | | MTKNQVSLTCLVKGFYPSDIAVEWESNGQPEN |
| | | | | NYKTTPPVLDSDGSFFLYSKLTVDKSRWQQGN |
| | | | | VFSCSVMHEALHNHYTQKSLSLSPGKGGGGQ |
| | | | | VQLQESGPGLVKPSETLSLTCTVSGGSISSSSYF |
| | | | | WGWIRQPPGKCLEWIGNIYYSGSSNYNPSLKS |
| | | | | RVTISVDTSKNQFSLKLSSVTAADTAVYYCAR |
| | | | | LPRGDRDAFDIWGQGTMVTVSSGGGGSGGGG |
| | | | | SGGGGSDIVMTQSPSSLSASVGDRVTITCRASQ |
| | | | | GISNYLAWYQQKPGKVPKLLIYAASTLQSGVP |
| | | | | SRFSGSGSGTDFTLTISSLQPEDFATYYCQQSYS |
| | | | | TPFTFGCGTKVEIKSGGGGSEVQLVESGGGLV |
| | | | | QPGGSLKLSCAASGFTFNKYAINWVREAPGKG |
| | | | | LEWVARIRSKYNNYATYYADAVKDRFTISRDD |
| | | | | SKNTAYLQMNNLKTEDTAVYYCVRNANFGTS |
| | | | | YISYFAYWGQGTLVTVSSGGGGSGGGGSGGG |
| | | | | GSQTVVTQEPSLTVSPGGTVTLTCGSSTGAVTS |
| | | | | GNYPNWVQKKPGQAPRGLIGGTKFLAPGTPAR |
| | | | | FSGSLLGGKAALTLSGVQPEDEAEYYCVLWYS |
| | | | | NRWVFGSGTKLTVL |
| 262. | CH3 24-D7 CC x | artificial | aa | QVQLVQSGAEVKKPGASVKVSCKASGYTFTN |
| | G4 x scFc x G4 x | | | YWMNWVRQAPGQCLEWMGNIHSKAHGTNY |
| | MS 15-B12 CC x | | | NQKFQGRVTMTVDTSSSTAYMELSRLRSDDTA |
| | I2M2_GQ - Full | | | VYYCATRYFYVMDYWGQGTLVTVSSGGGGQ |
| | Sequence | | | GGGGQGGGGQDIQMTQSPSSLSASVGDRVTIT |
| | | | | CRASQDISNYLNWYQQKPGKVPKLLIYYTSRL |
| | | | | HSGVPSRFSGSGSGTDFTLTISSLQPEDVATYYC |
| | | | | VQYAQFPLTFGCGTKVEIKSGGGGQEVQLVES |
| | | | | GGGLVQPGGSLKLSCAASGFTFNKYAINWVRE |
| | | | | APGKGLEWVARIRSKYNNYATYYADAVKDRF |
| | | | | TISRDDSKNTAYLQMNNLKTEDTAVYYCVRN |
| | | | | ANFGTSYISYFAYWGQGTLVTVSSGGGGQGG |
| | | | | GGQGGGGQQTVVTQEPSLTVSPGGTVTLTCGS |
| | | | | STGAVTSGNYPNWVQKKPGQAPRGLIGGTKFL |
| | | | | APGTPARFSGSLLGGKAALTLSGVQPEDEAEY |
| | | | | YCVLWYSNRWVFGSGTKLTVLGGGGCPPCPA |
| | | | | PELLGGPSVFLFPPKPKDTLMISRTPEVTCVVV |
| | | | | DVSHEEPEVKFNWYVDGVEVHNAKTKPCEEQ |
| | | | | YGSTYRCVSVLTVLHQDWLNGKEYKCKVSNK |
| | | | | ALPAPIEKTISKAKGQPREPQVYTLPPSREEMT |
| | | | | KNQVSLTCLVKGFYPSDIAVEWESNGQPENNY |
| | | | | KTTPPVLDSDGSFFLYSKLTVDKSRWQQGNVF |
| | | | | SCSVMHEALHNHYTQKSLSLSPGKGGGGQGG |
| | | | | GGQGGGGQGGGGQGGGGQGGGGQCPPCPAP |
| | | | | ELLGGPSVFLFPPKPKDTLMISRTPEVTCVVVD |
| | | | | VSHEEPEVKFNWYVDGVEVHNAKTKPCEEQY |
| | | | | GSTYRCVSVLTVLHQDWLNGKEYKCKVSNKA |
| | | | | LPAPIEKTISKAKGQPREPQVYTLPPSREEMTK |
| | | | | NQVSLTCLVKGFYPSDIAVEWESNGQPENNYK |
| | | | | TTPPVLDSDGSFFLYSKLTVDKSRWQQGNVFS |
| | | | | CSVMHEALHNHYTQKSLSLSPGKGGGGQVQL |
| | | | | QESGPGLVKPSETLSLTCTVSGGSISSSSYFWG |
| | | | | WIRQPPGKCLEWIGNIYYSGSSNYNPSLKSRVT |
| | | | | ISVDTSKNQFSLKLSSVTAADTAVYYCARLPRG |
| | | | | DRDAFDIWGQGTMVTVSSGGGGQGGGGQGG |
| | | | | GGQDIVMTQSPSSLSASVGDRVTITCRASQGIS |
| | | | | NYLAWYQQKPGKVPKLLIYAASTLQSGVPSRF |
| | | | | SGSGSGTDFTLTISSLQPEDFATYYCQQSYSTPF |
| | | | | TFGCGTKVEIKSGGGGQEVQLVESGGGLVQPG |
| | | | | GSLKLSCAASGFTFNKYAINWVREAPGKGLEW |
| | | | | VARIRSKYNNYATYYADAVKDRFTISRDDSKN |
| | | | | TAYLQMNNLKTEDTAVYYCVRNANFGTSYIS |
| | | | | YFAYWGQGTLVTVSSGGGGQGGGGQGGGGQ |
| | | | | QTVVTQEPSLTVSPGGTVTLTCGSSTGAVTSGN |
| | | | | YPNWVQKKPGQAPRGLIGGTKFLAPGTPARFS |
| | | | | GSLLGGKAALTLSGVQPEDEAEYYCVLWYSN |
| | | | | RWVFGSGTKLTVL |
| 263. | CH3 24-D7 CC x | artificial | aa | QVQLVQSGAEVKKPGASVKVSCKASGYTFTN |
| | I2L x (G4Q)3x | | | YWMNWVRQAPGQCLEWMGNIHSKAHGTNY |
| | scFcmod x | | | NQKFQGRVTMTVDTSSSTAYMELSRLRSDDTA |
| | (G4Q)3 x MS 15- | | | VYYCATRYFYVMDYWGQGTLVTVSSGGGGQ |
| | B12 CC x I2L - | | | GGGGQGGGGQDIQMTQSPSSLSASVGDRVTIT |
| | Full Sequence | | | CRASQDISNYLNWYQQKPGKVPKLLIYYTSRL |
| | | | | HSGVPSRFSGSGSGTDFTLTISSLQPEDVATYYC |
| | | | | VQYAQFPLTFGCGTKVEIKSGGGGQEVQLVES |
| | | | | GGGLVQPGGSLKLSCAASGFTFNKYAMNWVR |
| | | | | QAPGKGMEWVARIRSKYNNYATYYADAVKD |
| | | | | RFTISRDDSKNTLYLQMNNLKTEDTAVYYCVR |
| | | | | AGNFGSSYISYFAYWGQGTLVTVSSGGGGQGG |
| | | | | GGQGGGGQQTVVTQEPSLTVSPGGTVTITCGS |
| | | | | STGAVTSGNYPNWIQKKPGQAPRGLIGGTKFL |
| | | | | APGTPARFSGSLEGGKAALTLSGVQPEDEAEY |
| | | | | YCVLYYSNRWVFGSGTKLTVLGGGGQGGGGQ |
| | | | | GGGGQCPPCPAPELLGGPSVFLFPPKPKDTLMI |
| | | | | SRTPEVTCVVVDVSHEEPEVKFNWYVDGVEV |
| | | | | HNAKTKPCEEQYGSTYRCVSVLTVLHQDWLN |
| | | | | GKEYKCKVSNKALPAPIEKTISKAKGQPREPQV |
| | | | | YTLPPSREEMTKNQVSLTCLVKGFYPSDIAVE |
| | | | | WESNGQPENNYKTTPPVLDSDGSFFLYSKLTV |
| | | | | DKSRWQQGNVFSCSVMHEALHNHYTQKSLSL |
| | | | | SPGKGGGGQGGGGQGGGGQGGGGQGGGGQG |
| | | | | GGGQCPPCPAPELLGGPSVFLFPPKPKDTLMIS |
| | | | | RTPEVTCVVVDVSHEEPEVKFNWYVDGVEVH |
| | | | | NAKTKPCEEQYGSTYRCVSVLTVLHQDWLNG |
| | | | | KEYKCKVSNKALPAPIEKTISKAKGQPREPQVY |
| | | | | TLPPSREEMTKNQVSLTCLVKGFYPSDIAVEWE |
| | | | | SNGQPENNYKTTPPVLDSDGSFFLYSKLTVDKS |
| | | | | RWQQGNVFSCSVMHEALHNHYTQKSLSLSPG |
| | | | | KGGGGQGGGGQGGGGQQVQLQESGPGLVKPS |
| | | | | ETLSLTCTVSGGSISSSSYFWGWIRQPPGKCLE |
| | | | | WIGNIYYSGSSNYNPSLKSRVTISVDTSKNQFSL |
| | | | | KLSSVTAADTAVYYCARLPRGDRDAFDIWGQ |
| | | | | GTMVTVSSGGGGQGGGGQGGGGQDIVMTQSP |
| | | | | SSLSASVGDRVTITCRASQGISNYLAWYQQKP |
| | | | | GKVPKLLIYAASTLQSGVPSRFSGSGSGTDFTL |
| | | | | TISSLQPEDFATYYCQQSYSTPFTFGCGTKVEIK |
| | | | | SGGGGQEVQLVESGGGLVQPGGSLKLSCAASG |
| | | | | FTFNKYAMNWVRQAPGKGMEWVARIRSKYN |
| | | | | NYATYYADAVKDRFTISRDDSKNTLYLQMNN |
| | | | | LKTEDTAVYYCVRAGNFGSSYISYFAYWGQGT |
| | | | | LVTVSSGGGGQGGGGQGGGGQQTVVTQEPSL |
| | | | | TVSPGGTVTITCGSSTGAVTSGNYPNWIQKKPG |
| | | | | QAPRGLIGGTKFLAPGTPARFSGSLEGGKAALT |
| | | | | LSGVQPEDEAEYYCVLYYSNRWVFGSGTKLT |
| | | | | VL |
| 264. | CH3 24-D7 CC x | artificial | aa | QVQLVQSGAEVKKPGASVKVSCKASGYTFTN |
| | I2L x G4 x scFc x | | | YWMNWVRQAPGQCLEWMGNIHSKAHGTNY |
| | G4 x MS 15-B12 | | | NQKFQGRVTMTVDTSSSTAYMELSRLRSDDTA |
| | CC x I2L - Full | | | VYYCATRYFYVMDYWGQGTLVTVSSGGGGS |
| | Sequence | | | GGGGSGGGGSDIQMTQSPSSLSASVGDRVTITC |
| | | | | RASQDISNYLNWYQQKPGKVPKLLIYYTSRLH |
| | | | | SGVPSRFSGSGSGTDFTLTISSLQPEDVATYYCV |
| | | | | QYAQFPLTFGCGTKVEIKSGGGGSEVQLVESG |
| | | | | GGLVQPGGSLKLSCAASGFTFNKYAMNWVRQ |
| | | | | APGKGMEWVARIRSKYNNYATYYADAVKDR |
| | | | | FTISRDDSKNTLYLQMNNLKTEDTAVYYCVRA |
| | | | | GNFGSSYISYFAYWGQGTLVTVSSGGGGSGGG |
| | | | | GSGGGGSQTVVTQEPSLTVSPGGTVTITCGSST |
| | | | | GAVTSGNYPNWIQKKPGQAPRGLIGGTKFLAP |
| | | | | GTPARFSGSLEGGKAALTLSGVQPEDEAEYYC |
| | | | | VLYYSNRWVFGSGTKLTVLGGGGDKTHTCPP |
| | | | | CPAPELLGGPSVFLFPPKPKDTLMISRTPEVTCV |
| | | | | VVDVSHEDPEVKFNWYVDGVEVHNAKTKPCE |
| | | | | EQYGSTYRCVSVLTVLHQDWLNGKEYKCKVS |
| | | | | NKALPAPIEKTISKAKGQPREPQVYTLPPSREE |
| | | | | MTKNQVSLTCLVKGFYPSDIAVEWESNGQPEN |
| | | | | NYKTTPPVLDSDGSFFLYSKLTVDKSRWQQGN |
| | | | | VFSCSVMHEALHNHYTQKSLSLSPGKGGGGSG |
| | | | | GGGSGGGGSGGGGSGGGGSGGGGSDKTHTCP |
| | | | | PCPAPELLGGPSVFLFPPKPKDTLMISRTPEVTC |
| | | | | VVVDVSHEDPEVKFNWYVDGVEVHNAKTKPC |
| | | | | EEQYGSTYRCVSVLTVLHQDWLNGKEYKCKV |
| | | | | SNKALPAPIEKTISKAKGQPREPQVYTLPPSREE |
| | | | | MTKNQVSLTCLVKGFYPSDIAVEWESNGQPEN |
| | | | | NYKTTPPVLDSDGSFFLYSKLTVDKSRWQQGN |
| | | | | VFSCSVMHEALHNHYTQKSLSLSPGKGGGGQ |
| | | | | VQLQESGPGLVKPSETLSLTCTVSGGSISSSSYF |
| | | | | WGWIRQPPGKCLEWIGNIYYSGSSNYNPSLKS |
| | | | | RVTISVDTSKNQFSLKLSSVTAADTAVYYCAR |
| | | | | LPRGDRDAFDIWGQGTMVTVSSGGGGSGGGG |
| | | | | SGGGGSDIVMTQSPSSLSASVGDRVTITCRASQ |
| | | | | GISNYLAWYQQKPGKVPKLLIYAASTLQSGVP |
| | | | | SRFSGSGSGTDFTLTISSLQPEDFATYYCQQSYS |
| | | | | TPFTFGCGTKVEIKSGGGGSEVQLVESGGGLV |
| | | | | QPGGSLKLSCAASGFTFNKYAMNWVRQAPGK |
| | | | | GMEWVARIRSKYNNYATYYADAVKDRFTISR |
| | | | | DDSKNTLYLQMNNLKTEDTAVYYCVRAGNFG |
| | | | | SSYISYFAYWGQGTLVTVSSGGGGSGGGGSGG |
| | | | | GGSQTVVTQEPSLTVSPGGTVTITCGSSTGAVT |
| | | | | SGNYPNWIQKKPGQAPRGLIGGTKFLAPGTPA |
| | | | | RFSGSLEGGKAALTLSGVQPEDEAEYYCVLYY |
| | | | | SNRWVFGSGTKLTVL |
| 265. | CH3 24-D7 CC x | artificial | aa | QVQLVQSGAEVKKPGASVKVSCKASGYTFTN |
| | I2M2 x (G4Q)3x | | | YWMNWVRQAPGQCLEWMGNIHSKAHGTNY |
| | scFcmod x | | | NQKFQGRVTMTVDTSSSTAYMELSRLRSDDTA |
| | (G4Q)3 x MS 15- | | | VYYCATRYFYVMDYWGQGTLVTVSSGGGGQ |
| | B12 CC x I2M2 - | | | GGGGQGGGGQDIQMTQSPSSLSASVGDRVTIT |
| | Full Sequence | | | CRASQDISNYLNWYQQKPGKVPKLLIYYTSRL |
| | | | | HSGVPSRFSGSGSGTDFTLTISSLQPEDVATYYC |
| | | | | VQYAQFPLTFGCGTKVEIKSGGGGQEVQLVES |
| | | | | GGGLVQPGGSLKLSCAASGFTFNKYAINWVRE |
| | | | | APGKGLEWVARIRSKYNNYATYYADAVKDRF |
| | | | | TISRDDSKNTAYLQMNNLKTEDTAVYYCVRN |
| | | | | ANFGTSYISYFAYWGQGTLVTVSSGGGGQGG |
| | | | | GGQGGGGQQTVVTQEPSLTVSPGGTVTLTCGS |
| | | | | STGAVTSGNYPNWVQKKPGQAPRGLIGGTKFL |
| | | | | APGTPARFSGSLLGGKAALTLSGVQPEDEAEY |
| | | | | YCVLWYSNRWVFGSGTKLTVLGGGGQGGGG |
| | | | | QGGGGQCPPCPAPELLGGPSVFLFPPKPKDTLM |
| | | | | ISRTPEVTCVVVDVSHEEPEVKFNWYVDGVEV |
| | | | | HNAKTKPCEEQYGSTYRCVSVLTVLHQDWLN |
| | | | | GKEYKCKVSNKALPAPIEKTISKAKGQPREPQV |
| | | | | YTLPPSREEMTKNQVSLTCLVKGFYPSDIAVE |
| | | | | WESNGQPENNYKTTPPVLDSDGSFFLYSKLTV |
| | | | | DKSRWQQGNVFSCSVMHEALHNHYTQKSLSL |
| | | | | SPGKGGGGQGGGGQGGGGQGGGGQGGGGQG |
| | | | | GGGQCPPCPAPELLGGPSVFLFPPKPKDTLMIS |
| | | | | RTPEVTCVVVDVSHEEPEVKFNWYVDGVEVH |
| | | | | NAKTKPCEEQYGSTYRCVSVLTVLHQDWLNG |
| | | | | KEYKCKVSNKALPAPIEKTISKAKGQPREPQVY |
| | | | | TLPPSREEMTKNQVSLTCLVKGFYPSDIAVEWE |
| | | | | SNGQPENNYKTTPPVLDSDGSFFLYSKLTVDKS |
| | | | | RWQQGNVFSCSVMHEALHNHYTQKSLSLSPG |
| | | | | KGGGGQGGGGQGGGGQQVQLQESGPGLVKPS |
| | | | | ETLSLTCTVSGGSISSSSYFWGWIRQPPGKCLE |
| | | | | WIGNIYYSGSSNYNPSLKSRVTISVDTSKNQFSL |
| | | | | KLSSVTAADTAVYYCARLPRGDRDAFDIWGQ |
| | | | | GTMVTVSSGGGGQGGGGQGGGGQDIVMTQSP |
| | | | | SSLSASVGDRVTITCRASQGISNYLAWYQQKP |
| | | | | GKVPKLLIYAASTLQSGVPSRFSGSGSGTDFTL |
| | | | | TISSLQPEDFATYYCQQSYSTPFTFGCGTKVEIK |
| | | | | SGGGGQEVQLVESGGGLVQPGGSLKLSCAASG |
| | | | | FTFNKYAINWVREAPGKGLEWVARIRSKYNN |
| | | | | YATYYADAVKDRFTISRDDSKNTAYLQMNNL |
| | | | | KTEDTAVYYCVRNANFGTSYISYFAYWGQGT |
| | | | | LVTVSSGGGGQGGGGQGGGGQQTVVTQEPSL |
| | | | | TVSPGGTVTLTCGSSTGAVTSGNYPNWVQKKP |
| | | | | GQAPRGLIGGTKFLAPGTPARFSGSLLGGKAAL |
| | | | | TLSGVQPEDEAEYYCVLWYSNRWVFGSGTKL |
| | | | | TVL |
| 266. | CH3 24-D7 CC x | artificial | aa | QVQLVQSGAEVKKPGASVKVSCKASGYTFTN |
| | I2M2 x G4S3 x | | | YWMNWVRQAPGQCLEWMGNIHSKAHGTNY |
| | scFc x G4S3 x | | | NQKFQGRVTMTVDTSSSTAYMELSRLRSDDTA |
| | MS 15-B12 CC x | | | VYYCATRYFYVMDYWGQGTLVTVSSGGGGS |
| | I2M2 - Full | | | GGGGSGGGGSDIQMTQSPSSLSASVGDRVTITC |
| | Sequence | | | RASQDISNYLNWYQQKPGKVPKLLIYYTSRLH |
| | | | | SGVPSRFSGSGSGTDFTLTISSLQPEDVATYYCV |
| | | | | QYAQFPLTFGCGTKVEIKSGGGGSEVQLVESG |
| | | | | GGLVQPGGSLKLSCAASGFTFNKYAINWVREA |
| | | | | PGKGLEWVARIRSKYNNYATYYADAVKDRFTI |
| | | | | SRDDSKNTAYLQMNNLKTEDTAVYYCVRNAN |
| | | | | FGTSYISYFAYWGQGTLVTVSSGGGGSGGGGS |
| | | | | GGGGSQTVVTQEPSLTVSPGGTVTLTCGSSTG |
| | | | | AVTSGNYPNWVQKKPGQAPRGLIGGTKFLAPG |
| | | | | TPARFSGSLLGGKAALTLSGVQPEDEAEYYCV |
| | | | | LWYSNRWVFGSGTKLTVLGGGGSGGGGSGGG |
| | | | | GSDKTHTCPPCPAPELLGGPSVFLFPPKPKDTL |
| | | | | MISRTPEVTCVVVDVSHEDPEVKFNWYVDGV |
| | | | | EVHNAKTKPCEEQYGSTYRCVSVLTVLHQDW |
| | | | | LNGKEYKCKVSNKALPAPIEKTISKAKGQPREP |
| | | | | QVYTLPPSREEMTKNQVSLTCLVKGFYPSDIAV |
| | | | | EWESNGQPENNYKTTPPVLDSDGSFFLYSKLT |
| | | | | VDKSRWQQGNVFSCSVMHEALHNHYTQKSLS |
| | | | | LSPGKGGGGSGGGGSGGGGSGGGGSGGGGSG |
| | | | | GGGSDKTHTCPPCPAPELLGGPSVFLFPPKPKD |
| | | | | TLMISRTPEVTCVVVDVSHEDPEVKFNWYVDG |
| | | | | VEVHNAKTKPCEEQYGSTYRCVSVLTVLHQD |
| | | | | WLNGKEYKCKVSNKALPAPIEKTISKAKGQPR |
| | | | | EPQVYTLPPSREEMTKNQVSLTCLVKGFYPSDI |
| | | | | AVEWESNGQPENNYKTTPPVLDSDGSFFLYSK |
| | | | | LTVDKSRWQQGNVFSCSVMHEALHNHYTQKS |
| | | | | LSLSPGKGGGGSGGGGSGGGGSQVQLQESGPG |
| | | | | LVKPSETLSLTCTVSGGSISSSSYFWGWIRQPPG |
| | | | | KCLEWIGNIYYSGSSNYNPSLKSRVTISVDTSK |
| | | | | NQFSLKLSSVTAADTAVYYCARLPRGDRDAFD |
| | | | | IWGQGTMVTVSSGGGGSGGGGSGGGGSDIVM |
| | | | | TQSPSSLSASVGDRVTITCRASQGISNYLAWYQ |
| | | | | QKPGKVPKLLIYAASTLQSGVPSRFSGSGSGTD |
| | | | | FTLTISSLQPEDFATYYCQQSYSTPFTFGCGTKV |
| | | | | EIKSGGGGSEVQLVESGGGLVQPGGSLKLSCA |
| | | | | ASGFTFNKYAINWVREAPGKGLEWVARIRSKY |
| | | | | NNYATYYADAVKDRFTISRDDSKNTAYLQMN |
| | | | | NLKTEDTAVYYCVRNANFGTSYISYFAYWGQ |
| | | | | GTLVTVSSGGGGSGGGGSGGGGSQTVVTQEPS |
| | | | | LTVSPGGTVTLTCGSSTGAVTSGNYPNWVQKK |
| | | | | PGQAPRGLIGGTKFLAPGTPARFSGSLLGGKAA |
| | | | | LTLSGVQPEDEAEYYCVLWYSNRWVFGSGTK |
| | | | | LTVL |
| 267. | CH3 24-D7 CCx | artificial | aa | QVQLVQSGAEVKKPGASVKVSCKASGYTFTN |
| | 6H10.09x | | | YWMNWVRQAPGQCLEWMGNIHSKAHGTNY |
| | (G4S)3x scFcx | | | NQKFQGRVTMTVDTSSSTAYMELSRLRSDDTA |
| | (G4S)3x MS R4L | | | VYYCATRYFYVMDYWGQGTLVTVSSGGGGS |
| | CCx 6H10.09 - | | | GGGGSGGGGSDIQMTQSPSSLSASVGDRVTITC |
| | Full Sequence | | | RASQDISNYLNWYQQKPGKVPKLLIYYTSRLH |
| | | | | SGVPSRFSGSGSGTDFTLTISSLQPEDVATYYCV |
| | | | | QYAQFPLTFGCGTKVEIKSGGGGSEVQLVESG |
| | | | | GGLVQPGGSLKLSCAASGFTFNKYAMNWVRQ |
| | | | | APGKGMEWVARIRSKYNNYATYYADAVKDR |
| | | | | FTISRDDSKNTLYLQMNNLKTEDTAVYYCVRA |
| | | | | GNFGSSYISYFAYWGQGTLVTVSSGGGGSGGG |
| | | | | GSGGGGSQTVVTQEPSLTVSPGGTVTITCGSST |
| | | | | GAVTSGNYPNWIQKKPGQAPRGLIGGTKFLAP |
| | | | | GTPARFSGSLEGGKAALTLSGVQPEDEAEYYC |
| | | | | VLYYSNRWVFGSGTKLTVLGGGGSGGGGSGG |
| | | | | GGSDKTHTCPPCPAPELLGGPSVFLFPPKPKDT |
| | | | | LMISRTPEVTCVVVDVSHEDPEVKFNWYVDG |
| | | | | VEVHNAKTKPCEEQYGSTYRCVSVLTVLHQD |
| | | | | WLNGKEYKCKVSNKALPAPIEKTISKAKGQPR |
| | | | | EPQVYTLPPSREEMTKNQVSLTCLVKGFYPSDI |
| | | | | AVEWESNGQPENNYKTTPPVLDSDGSFFLYSK |
| | | | | LTVDKSRWQQGNVFSCSVMHEALHNHYTQKS |
| | | | | LSLSPGKGGGGSGGGGSGGGGSGGGGSGGGG |
| | | | | SGGGGSDKTHTCPPCPAPELLGGPSVFLFPPKP |
| | | | | KDTLMISRTPEVTCVVVDVSHEDPEVKFNWYV |
| | | | | DGVEVHNAKTKPCEEQYGSTYRCVSVLTVLH |
| | | | | QDWLNGKEYKCKVSNKALPAPIEKTISKAKGQ |
| | | | | PREPQVYTLPPSREEMTKNQVSLTCLVKGFYPS |
| | | | | DIAVEWESNGQPENNYKTTPPVLDSDGSFFLYS |
| | | | | KLTVDKSRWQQGNVFSCSVMHEALHNHYTQK |
| | | | | SLSLSPGKGGGGSGGGGSGGGGSQVQLVQSGA |
| | | | | EVKKPGASVKVSCKASGYTFTGYYIHWVRQA |
| | | | | PGQCLEWMGWINPNSGGTNYAQKFQGRVTMT |
| | | | | RDTSISTAYMELSRLRSDDTAVYYCARVEAVA |
| | | | | GREYYYFSGMDVWGQGTTVTVSSGGGGSGGG |
| | | | | GSGGGGSSYELTQPPSVSVSPGQTASITCSGEK |
| | | | | LGDKYVYWYQQKPGQSPVLVIYQSTKRPSGVP |
| | | | | ERFSGSNSGNTATLTISGTQAMDEADYYCQAY |
| | | | | HASTAVFGCGTKLTVLSGGGGSEVQLVESGGG |
| | | | | LVQPGGSLKLSCAASGFTFNKYAMNWVRQAP |
| | | | | GKGMEWVARIRSKYNNYATYYADAVKDRFTI |
| | | | | SRDDSKNTLYLQMNNLKTEDTAVYYCVRAGN |
| | | | | FGSSYISYFAYWGQGTLVTVSSGGGGSGGGGS |
| | | | | GGGGSQTVVTQEPSLTVSPGGTVTITCGSSTGA |
| | | | | VTSGNYPNWIQKKPGQAPRGLIGGTKFLAPGT |
| | | | | PARFSGSLEGGKAALTLSGVQPEDEAEYYCVL |
| | | | | YYSNRWVFGSGTKLTVL |
| 268. | CH3 R164L CC x | artificial | aa | EVQLLESGGGLVQPGGSVRLSCAASGFTESSY |
| | I2Ccc(44/100)x | | | WMYWVRQAPGKCLEWVSKIDPSDDYTNYNQ |
| | (G4S)3x scFcx | | | KVKGRFTISIDNSKNTLYLQMNSLRAEDSAVY |
| | (G4S)3x MS R4L | | | YCARWDYTHFDVWGQGTTVTVSSGGGGSGG |
| | CCx | | | GGSGGGGSEIVMTQSPATLSVSPGERATLSCRA |
| | I2Ccc(44/100) - | | | SSSVSYMHWYQQKPGQAPRLLIYGTSNLASGV |
| | Full Sequence | | | PVRFSGSGSGTEFTLTISRLQSEDVAVYYCQQW |
| | | | | SSYPLTFGCGTKVEIKSGGGGSEVQLVESGGGL |
| | | | | VQPGGSLKLSCAASGFTFNKYAMNWVRQAPG |
| | | | | KCLEWVARIRSKYNNYATYYADSVKDRFTISR |
| | | | | DDSKNTAYLQMNNLKTEDTAVYYCVRHGNFG |
| | | | | NSYISYWAYWGQGTLVTVSSGGGGSGGGGSG |
| | | | | GGGSQTVVTQEPSLTVSPGGTVTLTCGSSTGA |
| | | | | VTSGNYPNWVQQKPGQAPRGLIGGTKFLAPGT |
| | | | | PARFSGSLLGGKAALTLSGVQPEDEAEYYCVL |
| | | | | WYSNRWVFGCGTKLTVLGGGGSGGGGSGGG |
| | | | | GSDKTHTCPPCPAPELLGGPSVFLFPPKPKDTL |
| | | | | MISRTPEVTCVVVDVSHEDPEVKFNWYVDGV |
| | | | | EVHNAKTKPCEEQYGSTYRCVSVLTVLHQDW |
| | | | | LNGKEYKCKVSNKALPAPIEKTISKAKGQPREP |
| | | | | QVYTLPPSREEMTKNQVSLTCLVKGFYPSDIAV |
| | | | | EWESNGQPENNYKTTPPVLDSDGSFFLYSKLT |
| | | | | VDKSRWQQGNVFSCSVMHEALHNHYTQKSLS |
| | | | | LSPGKGGGGSGGGGSGGGGSGGGGSGGGGSG |
| | | | | GGGSDKTHTCPPCPAPELLGGPSVFLFPPKPKD |
| | | | | TLMISRTPEVTCVVVDVSHEDPEVKFNWYVDG |
| | | | | VEVHNAKTKPCEEQYGSTYRCVSVLTVLHQD |
| | | | | WLNGKEYKCKVSNKALPAPIEKTISKAKGQPR |
| | | | | EPQVYTLPPSREEMTKNQVSLTCLVKGFYPSDI |
| | | | | AVEWESNGQPENNYKTTPPVLDSDGSFFLYSK |
| | | | | LTVDKSRWQQGNVFSCSVMHEALHNHYTQKS |
| | | | | LSLSPGKGGGGSGGGGSGGGGSQVQLVQSGA |
| | | | | EVKKPGASVKVSCKASGYTFTGYYIHWVRQA |
| | | | | PGQCLEWMGWINPNSGGTNYAQKFQGRVTMT |
| | | | | RDTSISTAYMELSRLRSDDTAVYYCARVEAVA |
| | | | | GREYYYFSGMDVWGQGTTVTVSSGGGGSGGG |
| | | | | GSGGGGSSYELTQPPSVSVSPGQTASITCSGEK |
| | | | | LGDKYVYWYQQKPGQSPVLVIYQSTKRPSGVP |
| | | | | ERFSGSNSGNTATLTISGTQAMDEADYYCQAY |
| | | | | HASTAVFGCGTKLTVLSGGGGSEVQLVESGGG |
| | | | | LVQPGGSLKLSCAASGFTFNKYAMNWVRQAP |
| | | | | GKCLEWVARIRSKYNNYATYYADSVKDRFTIS |
| | | | | RDDSKNTAYLQMNNLKTEDTAVYYCVRHGNF |
| | | | | GNSYISYWAYWGQGTLVTVSSGGGGSGGGGS |
| | | | | GGGGSQTVVTQEPSLTVSPGGTVTLTCGSSTG |
| | | | | AVTSGNYPNWVQQKPGQAPRGLIGGTKFLAPG |
| | | | | TPARFSGSLLGGKAALTLSGVQPEDEAEYYCV |
| | | | | LWYSNRWVFGCGTKLTVL |
| 269. | CH3 R164L CCx | artificial | aa | EVQLLESGGGLVQPGGSVRLSCAASGFTESSY |
| | 6H10.09x | | | WMYWVRQAPGKCLEWVSKIDPSDDYTNYNQ |
| | (G4S)3x scFcx | | | KVKGRFTISIDNSKNTLYLQMNSLRAEDSAVY |
| | (G4S)3x MS R4L | | | YCARWDYTHFDVWGQGTTVTVSSGGGGSGG |
| | CCx 6H10.09 - | | | GGSGGGGSEIVMTQSPATLSVSPGERATLSCRA |
| | Full Sequence | | | SSSVSYMHWYQQKPGQAPRLLIYGTSNLASGV |
| | | | | PVRFSGSGSGTEFTLTISRLQSEDVAVYYCQQW |
| | | | | SSYPLTFGCGTKVEIKSGGGGSEVQLVESGGGL |
| | | | | VQPGGSLKLSCAASGFTFNKYAMNWVRQAPG |
| | | | | KGMEWVARIRSKYNNYATYYADAVKDRFTIS |
| | | | | RDDSKNTLYLQMNNLKTEDTAVYYCVRAGNF |
| | | | | GSSYISYFAYWGQGTLVTVSSGGGGSGGGGSG |
| | | | | GGGSQTVVTQEPSLTVSPGGTVTITCGSSTGAV |
| | | | | TSGNYPNWIQKKPGQAPRGLIGGTKFLAPGTP |
| | | | | ARFSGSLEGGKAALTLSGVQPEDEAEYYCVLY |
| | | | | YSNRWVFGSGTKLTVLGGGGSGGGGSGGGGS |
| | | | | DKTHTCPPCPAPELLGGPSVFLFPPKPKDTLMIS |
| | | | | RTPEVTCVVVDVSHEDPEVKFNWYVDGVEVH |
| | | | | NAKTKPCEEQYGSTYRCVSVLTVLHQDWLNG |
| | | | | KEYKCKVSNKALPAPIEKTISKAKGQPREPQVY |
| | | | | TLPPSREEMTKNQVSLTCLVKGFYPSDIAVEWE |
| | | | | SNGQPENNYKTTPPVLDSDGSFFLYSKLTVDKS |
| | | | | RWQQGNVFSCSVMHEALHNHYTQKSLSLSPG |
| | | | | KGGGGSGGGGSGGGGSGGGGSGGGGSGGGGS |
| | | | | DKTHTCPPCPAPELLGGPSVFLFPPKPKDTLMIS |
| | | | | RTPEVTCVVVDVSHEDPEVKFNWYVDGVEVH |
| | | | | NAKTKPCEEQYGSTYRCVSVLTVLHQDWLNG |
| | | | | KEYKCKVSNKALPAPIEKTISKAKGQPREPQVY |
| | | | | TLPPSREEMTKNQVSLTCLVKGFYPSDIAVEWE |
| | | | | SNGQPENNYKTTPPVLDSDGSFFLYSKLTVDKS |
| | | | | RWQQGNVFSCSVMHEALHNHYTQKSLSLSPG |
| | | | | KGGGGSGGGGSGGGGSQVQLVQSGAEVKKPG |
| | | | | ASVKVSCKASGYTFTGYYIHWVRQAPGQCLE |
| | | | | WMGWINPNSGGTNYAQKFQGRVTMTRDTSIS |
| | | | | TAYMELSRLRSDDTAVYYCARVEAVAGREYY |
| | | | | YFSGMDVWGQGTTVTVSSGGGGSGGGGSGGG |
| | | | | GSSYELTQPPSVSVSPGQTASITCSGEKLGDKY |
| | | | | VYWYQQKPGQSPVLVIYQSTKRPSGVPERFSG |
| | | | | SNSGNTATLTISGTQAMDEADYYCQAYHASTA |
| | | | | VFGCGTKLTVLSGGGGSEVQLVESGGGLVQPG |
| | | | | GSLKLSCAASGFTFNKYAMNWVRQAPGKGME |
| | | | | WVARIRSKYNNYATYYADAVKDRFTISRDDSK |
| | | | | NTLYLQMNNLKTEDTAVYYCVRAGNFGSSYIS |
| | | | | YFAYWGQGTLVTVSSGGGGSGGGGSGGGGSQ |
| | | | | TVVTQEPSLTVSPGGTVTITCGSSTGAVTSGNY |
| | | | | PNWIQKKPGQAPRGLIGGTKFLAPGTPARFSGS |
| | | | | LEGGKAALTLSGVQPEDEAEYYCVLYYSNRW |
| | | | | VFGSGTKLTVL |
| 270. | CH3 R164L CCx | artificial | Aa | EVQLLESGGGLVQPGGSVRLSCAASGFTFSSY |
| | I2Ccc(44/100)x | | | WMYWVRQAPGKCLEWVSKIDPSDDYTNYNQ |
| | (G4)x scFc x (G4) | | | KVKGRFTISIDNSKNTLYLQMNSLRAEDSAVY |
| | x MS R4L CCx | | | YCARWDYTHFDVWGQGTTVTVSSGGGGSGG |
| | I2Ccc(44/100) - | | | GGSGGGGSEIVMTQSPATLSVSPGERATLSCRA |
| | Full Sequence | | | SSSVSYMHWYQQKPGQAPRLLIYGTSNLASGV |
| | | | | PVRFSGSGSGTEFTLTISRLQSEDVAVYYCQQW |
| | | | | SSYPLTFGCGTKVEIKSGGGGSEVQLVESGGGL |
| | | | | VQPGGSLKLSCAASGFTFNKYAMNWVRQAPG |
| | | | | KCLEWVARIRSKYNNYATYYADSVKDRFTISR |
| | | | | DDSKNTAYLQMNNLKTEDTAVYYCVRHGNFG |
| | | | | NSYISYWAYWGQGTLVTVSSGGGGSGGGGSG |
| | | | | GGGSQTVVTQEPSLTVSPGGTVTLTCGSSTGA |
| | | | | VTSGNYPNWVQQKPGQAPRGLIGGTKFLAPGT |
| | | | | PARFSGSLLGGKAALTLSGVQPEDEAEYYCVL |
| | | | | WYSNRWVFGCGTKLTVLGGGGDKTHTCPPCP |
| | | | | APELLGGPSVFLFPPKPKDTLMISRTPEVTCVV |
| | | | | VDVSHEDPEVKFNWYVDGVEVHNAKTKPCEE |
| | | | | QYGSTYRCVSVLTVLHQDWLNGKEYKCKVSN |
| | | | | KALPAPIEKTISKAKGQPREPQVYTLPPSREEM |
| | | | | TKNQVSLTCLVKGFYPSDIAVEWESNGQPENN |
| | | | | YKTTPPVLDSDGSFFLYSKLTVDKSRWQQGNV |
| | | | | FSCSVMHEALHNHYTQKSLSLSPGKGGGGSGG |
| | | | | GGSGGGGSGGGGSGGGGSGGGGSDKTHTCPP |
| | | | | CPAPELLGGPSVFLFPPKPKDTLMISRTPEVTCV |
| | | | | VVDVSHEDPEVKFNWYVDGVEVHNAKTKPCE |
| | | | | EQYGSTYRCVSVLTVLHQDWLNGKEYKCKVS |
| | | | | NKALPAPIEKTISKAKGQPREPQVYTLPPSREE |
| | | | | MTKNQVSLTCLVKGFYPSDIAVEWESNGQPEN |
| | | | | NYKTTPPVLDSDGSFFLYSKLTVDKSRWQQGN |
| | | | | VFSCSVMHEALHNHYTQKSLSLSPGKGGGGQ |
| | | | | VQLVQSGAEVKKPGASVKVSCKASGYTFTGY |
| | | | | YIHWVRQAPGQCLEWMGWINPNSGGTNYAQ |
| | | | | KFQGRVTMTRDTSISTAYMELSRLRSDDTAVY |
| | | | | YCARVEAVAGREYYYFSGMDVWGQGTTVTV |
| | | | | SSGGGGSGGGGSGGGGSSYELTQPPSVSVSPG |
| | | | | QTASITCSGEKLGDKYVYWYQQKPGQSPVLVI |
| | | | | YQSTKRPSGVPERFSGSNSGNTATLTISGTQAM |
| | | | | DEADYYCQAYHASTAVFGCGTKLTVLSGGGG |
| | | | | SEVQLVESGGGLVQPGGSLKLSCAASGFTFNK |
| | | | | YAMNWVRQAPGKCLEWVARIRSKYNNYATY |
| | | | | YADSVKDRFTISRDDSKNTAYLQMNNLKTEDT |
| | | | | AVYYCVRHGNFGNSYISYWAYWGQGTLVTVS |
| | | | | SGGGGSGGGGSGGGGSQTVVTQEPSLTVSPGG |
| | | | | TVTLTCGSSTGAVTSGNYPNWVQQKPGQAPR |
| | | | | GLIGGTKFLAPGTPARFSGSLLGGKAALTLSGV |
| | | | | QPEDEAEYYCVLWYSNRWVFGCGTKLTVL |
| 271. | CH3 R170R CC x | artificial | Aa | EVQLLESGGGLVQPGGSLRLSCAASGFTFSSY |
| | I2C 44/100cc x | | | WMHWVRQTPGKCLEWVSKIDPSDDYTNYNQ |
| | scFc x MS R4L | | | KVKGRFTISIDKSKNTLYLQMNSLRAEDTAVY |
| | CC x I2C | | | YCARWDYSHFDVWGQGTTVTVSSGGGGSGG |
| | 44/100cc0 - Full | | | GGSGGGGSEIVMTQSPATLSVSPGERATLTCRA |
| | Sequence | | | SSSVSYMHWYQQKPGQAPRLLIYGTSNLVSGV |
| | | | | PARFSGSGSGTEFTLTISSLQSEDFAVYYCQQW |
| | | | | SSYPLTFGCGTKVEIKSGGGGSEVQLVESGGGL |
| | | | | VQPGGSLKLSCAASGFTFNKYAMNWVRQAPG |
| | | | | KCLEWVARIRSKYNNYATYYADSVKDRFTISR |
| | | | | DDSKNTAYLQMNNLKTEDTAVYYCVRHGNFG |
| | | | | NSYISYWAYWGQGTLVTVSSGGGGSGGGGSG |
| | | | | GGGSQTVVTQEPSLTVSPGGTVTLTCGSSTGA |
| | | | | VTSGNYPNWVQQKPGQAPRGLIGGTKFLAPGT |
| | | | | PARFSGSLLGGKAALTLSGVQPEDEAEYYCVL |
| | | | | WYSNRWVFGCGTKLTVLGGGGSGGGGSGGG |
| | | | | GSDKTHTCPPCPAPELLGGPSVFLFPPKPKDTL |
| | | | | MISRTPEVTCVVVDVSHEDPEVKFNWYVDGV |
| | | | | EVHNAKTKPCEEQYGSTYRCVSVLTVLHQDW |
| | | | | LNGKEYKCKVSNKALPAPIEKTISKAKGQPREP |
| | | | | QVYTLPPSREEMTKNQVSLTCLVKGFYPSDIAV |
| | | | | EWESNGQPENNYKTTPPVLDSDGSFFLYSKLT |
| | | | | VDKSRWQQGNVFSCSVMHEALHNHYTQKSLS |
| | | | | LSPGKGGGGSGGGGSGGGGSGGGGSGGGGSG |
| | | | | GGGSDKTHTCPPCPAPELLGGPSVFLFPPKPKD |
| | | | | TLMISRTPEVTCVVVDVSHEDPEVKFNWYVDG |
| | | | | VEVHNAKTKPCEEQYGSTYRCVSVLTVLHQD |
| | | | | WLNGKEYKCKVSNKALPAPIEKTISKAKGQPR |
| | | | | EPQVYTLPPSREEMTKNQVSLTCLVKGFYPSDI |
| | | | | AVEWESNGQPENNYKTTPPVLDSDGSFFLYSK |
| | | | | LTVDKSRWQQGNVFSCSVMHEALHNHYTQKS |
| | | | | LSLSPGKGGGGSGGGGSGGGGSQVQLVQSGA |
| | | | | EVKKPGASVKVSCKASGYTFTGYYIHWVRQA |
| | | | | PGQCLEWMGWINPNSGGTNYAQKFQGRVTMT |
| | | | | RDTSISTAYMELSRLRSDDTAVYYCARVEAVA |
| | | | | GREYYYFSGMDVWGQGTTVTVSSGGGGSGGG |
| | | | | GSGGGGSSYELTQPPSVSVSPGQTASITCSGEK |
| | | | | LGDKYVYWYQQKPGQSPVLVIYQSTKRPSGVP |
| | | | | ERFSGSNSGNTATLTISGTQAMDEADYYCQAY |
| | | | | HASTAVFGCGTKLTVLSGGGGSEVQLVESGGG |
| | | | | LVQPGGSLKLSCAASGFTFNKYAMNWVRQAP |
| | | | | GKCLEWVARIRSKYNNYATYYADSVKDRFTIS |
| | | | | RDDSKNTAYLQMNNLKTEDTAVYYCVRHGNF |
| | | | | GNSYISYWAYWGQGTLVTVSSGGGGSGGGGS |
| | | | | GGGGSQTVVTQEPSLTVSPGGTVTLTCGSSTG |
| | | | | AVTSGNYPNWVQQKPGQAPRGLIGGTKFLAPG |
| | | | | TPARFSGSLLGGKAALTLSGVQPEDEAEYYCV |
| | | | | LWYSNRWVFGCGTKLTVL |
| 272. | MS 01-G11 CCx | artificial | Aa | QVQLVESGGGLVKPGGSLRLSCAASGFTFSDY |
| | 6H10.09x | | | YMTWIRQAPGKCLEWLSYISSSGSTIYYAEAV |
| | (G4S)3x scFcx | | | KGRFTISRDNAKNSLFLQMNSLRAEDTAVYYC |
| | (G4S)3x CH3 | | | ARDRNSHFDYWGQGTLVTVSSGGGGSGGGGS |
| | 005-D5 CCx | | | GGGGSDIMTQSPSSVSASVGDRVTITCRASQGI |
| | 6H10.09 - Full | | | RTWLAWYQQKPGKAPKLLIYGASGLQSGVPS |
| | Sequence | | | RFSGSGSGTDFTLTISSLQPEDFATYYCQQAESF |
| | | | | PRTFGCGTKVEIKSGGGGSEVQLVESGGGLVQ |
| | | | | PGGSLKLSCAASGFTFNKYAMNWVRQAPGKG |
| | | | | MEWVARIRSKYNNYATYYADAVKDRFTISRD |
| | | | | DSKNTLYLQMNNLKTEDTAVYYCVRAGNFGS |
| | | | | SYISYFAYWGQGTLVTVSSGGGGSGGGGSGGG |
| | | | | GSQTVVTQEPSLTVSPGGTVTITCGSSTGAVTS |
| | | | | GNYPNWIQKKPGQAPRGLIGGTKFLAPGTPAR |
| | | | | FSGSLEGGKAALTLSGVQPEDEAEYYCVLYYS |
| | | | | NRWVFGSGTKLTVLGGGGSGGGGSGGGGSDK |
| | | | | THTCPPCPAPELLGGPSVFLFPPKPKDTLMISRT |
| | | | | PEVTCVVVDVSHEDPEVKFNWYVDGVEVHNA |
| | | | | KTKPCEEQYGSTYRCVSVLTVLHQDWLNGKE |
| | | | | YKCKVSNKALPAPIEKTISKAKGQPREPQVYTL |
| | | | | PPSREEMTKNQVSLTCLVKGFYPSDIAVEWES |
| | | | | NGQPENNYKTTPPVLDSDGSFFLYSKLTVDKS |
| | | | | RWQQGNVFSCSVMHEALHNHYTQKSLSLSPG |
| | | | | KGGGGSGGGGSGGGGSGGGGSGGGGSGGGGS |
| | | | | DKTHTCPPCPAPELLGGPSVFLFPPKPKDTLMIS |
| | | | | RTPEVTCVVVDVSHEDPEVKFNWYVDGVEVH |
| | | | | NAKTKPCEEQYGSTYRCVSVLTVLHQDWLNG |
| | | | | KEYKCKVSNKALPAPIEKTISKAKGQPREPQVY |
| | | | | TLPPSREEMTKNQVSLTCLVKGFYPSDIAVEWE |
| | | | | SNGQPENNYKTTPPVLDSDGSFFLYSKLTVDKS |
| | | | | RWQQGNVFSCSVMHEALHNHYTQKSLSLSPG |
| | | | | KGGGGSGGGGSGGGGSEVQLLESGGGLVQPG |
| | | | | GSLRLSCAASGFSFSSYPINWVRQAPGKCLEW |
| | | | | VGVIWTGGGTNYASSVKGRFTISRDNSKNTVY |
| | | | | LQMNSLRAEDTAVYYCAKSRGVYDFKGRGA |
| | | | | MDYWGQGTLVTVSSGGGGSGGGGSGGGGSDI |
| | | | | VMTQSPDSLAVSLGERATINCKSSQSLLYSSNQ |
| | | | | KNYFAWYQQKPGQPPKLLIYWASTRESGVPDR |
| | | | | FSGSGSGTDFTLTISSLQAEDVAVYYCQQYYSY |
| | | | | PYTFGCGTKLEIKSGGGGSEVQLVESGGGLVQ |
| | | | | PGGSLKLSCAASGFTFNKYAMNWVRQAPGKG |
| | | | | MEWVARIRSKYNNYATYYADAVKDRFTISRD |
| | | | | DSKNTLYLQMNNLKTEDTAVYYCVRAGNFGS |
| | | | | SYISYFAYWGQGTLVTVSSGGGGSGGGGSGGG |
| | | | | GSQTVVTQEPSLTVSPGGTVTITCGSSTGAVTS |
| | | | | GNYPNWIQKKPGQAPRGLIGGTKFLAPGTPAR |
| | | | | FSGSLEGGKAALTLSGVQPEDEAEYYCVLYYS |
| | | | | NRWVFGSGTKLTVL |
| 273. | MS 15-B12 CC x | artificial | Aa | QVQLQESGPGLVKPSETLSLTCTVSGGSISSSSY |
| | I2L x (G4Q)3 x | | | FWGWIRQPPGKCLEWIGNIYYSGSSNYNPSLKS |
| | scFc x (G4Q)3 x | | | RVTISVDTSKNQFSLKLSSVTAADTAVYYCAR |
| | CH3 22- A12 CC | | | LPRGDRDAFDIWGQGTMVTVSSGGGGQGGGG |
| | x I2L - Full | | | QGGGGQDIVMTQSPSSLSASVGDRVTITCRASQ |
| | Sequence | | | GISNYLAWYQQKPGKVPKLLIYAASTLQSGVP |
| | | | | SRFSGSGSGTDFTLTISSLQPEDFATYYCQQSYS |
| | | | | TPFTFGCGTKVEIKSGGGGQEVQLVESGGGLV |
| | | | | QPGGSLKLSCAASGFTFNKYAMNWVRQAPGK |
| | | | | GMEWVARIRSKYNNYATYYADAVKDRFTISR |
| | | | | DDSKNTLYLQMNNLKTEDTAVYYCVRAGNFG |
| | | | | SSYISYFAYWGQGTLVTVSSGGGGQGGGGQG |
| | | | | GGGQQTVVTQEPSLTVSPGGTVTITCGSSTGAV |
| | | | | TSGNYPNWIQKKPGQAPRGLIGGTKFLAPGTP |
| | | | | ARFSGSLEGGKAALTLSGVQPEDEAEYYCVLY |
| | | | | YSNRWVFGSGTKLTVLGGGGQGGGGQGGGG |
| | | | | QCPPCPAPELLGGPSVFLFPPKPKDTLMISRTPE |
| | | | | VTCVVVDVSHEEPEVKFNWYVDGVEVHNAKT |
| | | | | KPCEEQYGSTYRCVSVLTVLHQDWLNGKEYK |
| | | | | CKVSNKALPAPIEKTISKAKGQPREPQVYTLPP |
| | | | | SREEMTKNQVSLTCLVKGFYPSDIAVEWESNG |
| | | | | QPENNYKTTPPVLDSDGSFFLYSKLTVDKSRW |
| | | | | QQGNVFSCSVMHEALHNHYTQKSLSLSPGKG |
| | | | | GGGQGGGGQGGGGQGGGGQGGGGQGGGGQ |
| | | | | CPPCPAPELLGGPSVFLFPPKPKDTLMISRTPEV |
| | | | | TCVVVDVSHEEPEVKFNWYVDGVEVHNAKTK |
| | | | | PCEEQYGSTYRCVSVLTVLHQDWLNGKEYKC |
| | | | | KVSNKALPAPIEKTISKAKGQPREPQVYTLPPS |
| | | | | REEMTKNQVSLTCLVKGFYPSDIAVEWESNGQ |
| | | | | PENNYKTTPPVLDSDGSFFLYSKLTVDKSRWQ |
| | | | | QGNVFSCSVMHEALHNHYTQKSLSLSPGKGG |
| | | | | GGQGGGGQGGGGQQVQLVQSGAEVVKPGAS |
| | | | | VKVSCKASGYTFTSSWMNWVRQAPGQCLEW |
| | | | | MGRIYTGTGETKYSGKFQGRVTITRDTSASTA |
| | | | | YMELSSLTSEDTAVYYCARQRDYGALYAMDY |
| | | | | WGQGTLVTVSSGGGGQGGGGQGGGGQDIQLT |
| | | | | QSPSFLSASVGDRVTITCRASDDIYSYLAWYQQ |
| | | | | KPGKAPKLLVYNAKTLAEGVPSRFSGSGSGTE |
| | | | | FTLTISSLQPEDFATYYCQNHDRTPFTFGCGTK |
| | | | | VDIKSGGGGQEVQLVESGGGLVQPGGSLKLSC |
| | | | | AASGFTFNKYAMNWVRQAPGKGMEWVARIR |
| | | | | SKYNNYATYYADAVKDRFTISRDDSKNTLYLQ |
| | | | | MNNLKTEDTAVYYCVRAGNFGSSYISYFAYW |
| | | | | GQGTLVTVSSGGGGQGGGGQGGGGQQTVVT |
| | | | | QEPSLTVSPGGTVTITCGSSTGAVTSGNYPNWI |
| | | | | QKKPGQAPRGLIGGTKFLAPGTPARFSGSLEGG |
| | | | | KAALTLSGVQPEDEAEYYCVLYYSNRWVFGS |
| | | | | GTKLTVL |
| 274. | MS 15-B12 CC x | artificial | Aa | QVQLQESGPGLVKPSETLSLTCTVSGGSISSSSY |
| | I2L x (G4Q)3x | | | FWGWIRQPPGKCLEWIGNIYYSGSSNYNPSLKS |
| | scFc x (G4Q)3 x | | | RVTISVDTSKNQFSLKLSSVTAADTAVYYCAR |
| | CH3 15-E11 CC x | | | LPRGDRDAFDIWGQGTMVTVSSGGGGQGGGG |
| | I2L - Full | | | QGGGGQDIVMTQSPSSLSASVGDRVTITCRASQ |
| | Sequence | | | GISNYLAWYQQKPGKVPKLLIYAASTLQSGVP |
| | | | | SRFSGSGSGTDFTLTISSLQPEDFATYYCQQSYS |
| | | | | TPFTFGCGTKVEIKSGGGGQEVQLVESGGGLV |
| | | | | QPGGSLKLSCAASGFTFNKYAMNWVRQAPGK |
| | | | | GMEWVARIRSKYNNYATYYADAVKDRFTISR |
| | | | | DDSKNTLYLQMNNLKTEDTAVYYCVRAGNFG |
| | | | | SSYISYFAYWGQGTLVTVSSGGGGQGGGGQG |
| | | | | GGGQQTVVTQEPSLTVSPGGTVTITCGSSTGAV |
| | | | | TSGNYPNWIQKKPGQAPRGLIGGTKFLAPGTP |
| | | | | ARFSGSLEGGKAALTLSGVQPEDEAEYYCVLY |
| | | | | YSNRWVFGSGTKLTVLGGGGQGGGGQGGGG |
| | | | | QCPPCPAPELLGGPSVFLFPPKPKDTLMISRTPE |
| | | | | VTCVVVDVSHEEPEVKFNWYVDGVEVHNAKT |
| | | | | KPCEEQYGSTYRCVSVLTVLHQDWLNGKEYK |
| | | | | CKVSNKALPAPIEKTISKAKGQPREPQVYTLPP |
| | | | | SREEMTKNQVSLTCLVKGFYPSDIAVEWESNG |
| | | | | QPENNYKTTPPVLDSDGSFFLYSKLTVDKSRW |
| | | | | QQGNVFSCSVMHEALHNHYTQKSLSLSPGKG |
| | | | | GGGQGGGGQGGGGQGGGGQGGGGQGGGGQ |
| | | | | CPPCPAPELLGGPSVFLFPPKPKDTLMISRTPEV |
| | | | | TCVVVDVSHEEPEVKFNWYVDGVEVHNAKTK |
| | | | | PCEEQYGSTYRCVSVLTVLHQDWLNGKEYKC |
| | | | | KVSNKALPAPIEKTISKAKGQPREPQVYTLPPS |
| | | | | REEMTKNQVSLTCLVKGFYPSDIAVEWESNGQ |
| | | | | PENNYKTTPPVLDSDGSFFLYSKLTVDKSRWQ |
| | | | | QGNVFSCSVMHEALHNHYTQKSLSLSPGKGG |
| | | | | GGQGGGGQGGGGQQVQLVQSGAEVKKPGAS |
| | | | | VKVSCKASGYTFTNYWMNWVRQAPGQCLEW |
| | | | | MGNIAYGVKGTNYNQKFQGRVTMTVDTSSST |
| | | | | AYMELSRLRSDDTAVYYCATRYFYVMDYWG |
| | | | | QGTLVTVSSGGGGQGGGGQGGGGQDIQMTQS |
| | | | | PSSLSASVGDRVTITCRASQDISNYLNWYQQKP |
| | | | | GKVPKLLIYYTSRLHSGVPSRFSGSGSGTDFTL |
| | | | | TISSLQPEDVATYYCVQYAQFPLTFGCGTKVEI |
| | | | | KSGGGGQEVQLVESGGGLVQPGGSLKLSCAAS |
| | | | | GFTFNKYAMNWVRQAPGKGMEWVARIRSKY |
| | | | | NNYATYYADAVKDRFTISRDDSKNTLYLQMN |
| | | | | NLKTEDTAVYYCVRAGNFGSSYISYFAYWGQ |
| | | | | GTLVTVSSGGGGQGGGGQGGGGQQTVVTQEP |
| | | | | SLTVSPGGTVTITCGSSTGAVTSGNYPNWIQKK |
| | | | | PGQAPRGLIGGTKFLAPGTPARFSGSLEGGKAA |
| | | | | LTLSGVQPEDEAEYYCVLYYSNRWVFGSGTKL |
| | | | | TVL |
| 275. | MS 15-B12 CC x | artificial | Aa | QVQLQESGPGLVKPSETLSLTCTVSGGSISSSSY |
| | I2L x G4 x scFc | | | FWGWIRQPPGKCLEWIGNIYYSGSSNYNPSLKS |
| | xG4 x CH3 26-E5 | | | RVTISVDTSKNQFSLKLSSVTAADTAVYYCAR |
| | CC x I2L_GQ - | | | LPRGDRDAFDIWGQGTMVTVSSGGGGQGGGG |
| | Full Sequence | | | QGGGGQDIVMTQSPSSLSASVGDRVTITCRASQ |
| | | | | GISNYLAWYQQKPGKVPKLLIYAASTLQSGVP |
| | | | | SRFSGSGSGTDFTLTISSLQPEDFATYYCQQSYS |
| | | | | TPFTFGCGTKVEIKSGGGGQEVQLVESGGGLV |
| | | | | QPGGSLKLSCAASGFTFNKYAMNWVRQAPGK |
| | | | | GMEWVARIRSKYNNYATYYADAVKDRFTISR |
| | | | | DDSKNTLYLQMNNLKTEDTAVYYCVRAGNFG |
| | | | | SSYISYFAYWGQGTLVTVSSGGGGQGGGGQG |
| | | | | GGGQQTVVTQEPSLTVSPGGTVTITCGSSTGAV |
| | | | | TSGNYPNWIQKKPGQAPRGLIGGTKFLAPGTP |
| | | | | ARFSGSLEGGKAALTLSGVQPEDEAEYYCVLY |
| | | | | YSNRWVFGSGTKLTVLGGGGCPPCPAPELLGG |
| | | | | PSVFLFPPKPKDTLMISRTPEVTCVVVDVSHEE |
| | | | | PEVKFNWYVDGVEVHNAKTKPCEEQYGSTYR |
| | | | | CVSVLTVLHQDWLNGKEYKCKVSNKALPAPIE |
| | | | | KTISKAKGQPREPQVYTLPPSREEMTKNQVSLT |
| | | | | CLVKGFYPSDIAVEWESNGQPENNYKTTPPVL |
| | | | | DSDGSFFLYSKLTVDKSRWQQGNVFSCSVMHE |
| | | | | ALHNHYTQKSLSLSPGKGGGGQGGGGQGGGG |
| | | | | QGGGGQGGGGQGGGGQCPPCPAPELLGGPSV |
| | | | | FLFPPKPKDTLMISRTPEVTCVVVDVSHEEPEV |
| | | | | KFNWYVDGVEVHNAKTKPCEEQYGSTYRCVS |
| | | | | VLTVLHQDWLNGKEYKCKVSNKALPAPIEKTI |
| | | | | SKAKGQPREPQVYTLPPSREEMTKNQVSLTCL |
| | | | | VKGFYPSDIAVEWESNGQPENNYKTTPPVLDS |
| | | | | DGSFFLYSKLTVDKSRWQQGNVFSCSVMHEA |
| | | | | LHNHYTQKSLSLSPGKGGGGQVQLVQSGAEV |
| | | | | KKPGASVKVSCKASGYTFTSYWMHWVRQAP |
| | | | | GQCLEWMGVIRTSTSYTIYNQKFKGRVTMTRD |
| | | | | TSTSTVYMELSSLRSEDTAVYYCARSGPGYFD |
| | | | | VWGQGTMVTVSSGGGGQGGGGQGGGGQDIQ |
| | | | | LTQSPSFLSASVGDRVTITCRASENIYSYLAWY |
| | | | | QQKPGKAPKLLIYNAKTLAEGVPSRFSGSGSGT |
| | | | | EFTLTISSLQPEDFATYYCQHNYGTPYTFGCGT |
| | | | | KLEIKSGGGGQEVQLVESGGGLVQPGGSLKLS |
| | | | | CAASGFTFNKYAMNWVRQAPGKGMEWVARI |
| | | | | RSKYNNYATYYADAVKDRFTISRDDSKNTLYL |
| | | | | QMNNLKTEDTAVYYCVRAGNFGSSYISYFAY |
| | | | | WGQGTLVTVSSGGGGQGGGGQGGGGQQTVV |
| | | | | TQEPSLTVSPGGTVTITCGSSTGAVTSGNYPNW |
| | | | | IQKKPGQAPRGLIGGTKFLAPGTPARFSGSLEG |
| | | | | GKAALTLSGVQPEDEAEYYCVLYYSNRWVFG |
| | | | | SGTKLTVL |
| 276. | MS 15-B12 CC x | artificial | Aa | QVQLQESGPGLVKPSETLSLTCTVSGGSISSSSY |
| | I2L x G4 x scFc x | | | FWGWIRQPPGKCLEWIGNIYYSGSSNYNPSLKS |
| | G4 x CH3 005-D5 | | | RVTISVDTSKNQFSLKLSSVTAADTAVYYCAR |
| | CC x I2L_GQ - | | | LPRGDRDAFDIWGQGTMVTVSSGGGGQGGGG |
| | Full Sequence | | | QGGGGQDIVMTQSPSSLSASVGDRVTITCRASQ |
| | | | | GISNYLAWYQQKPGKVPKLLIYAASTLQSGVP |
| | | | | SRFSGSGSGTDFTLTISSLQPEDFATYYCQQSYS |
| | | | | TPFTFGCGTKVEIKSGGGGQEVQLVESGGGLV |
| | | | | QPGGSLKLSCAASGFTFNKYAMNWVRQAPGK |
| | | | | GMEWVARIRSKYNNYATYYADAVKDRFTISR |
| | | | | DDSKNTLYLQMNNLKTEDTAVYYCVRAGNFG |
| | | | | SSYISYFAYWGQGTLVTVSSGGGGQGGGGQG |
| | | | | GGGQQTVVTQEPSLTVSPGGTVTITCGSSTGAV |
| | | | | TSGNYPNWIQKKPGQAPRGLIGGTKFLAPGTP |
| | | | | ARFSGSLEGGKAALTLSGVQPEDEAEYYCVLY |
| | | | | YSNRWVFGSGTKLTVLGGGGCPPCPAPELLGG |
| | | | | PSVFLFPPKPKDTLMISRTPEVTCVVVDVSHEE |
| | | | | PEVKFNWYVDGVEVHNAKTKPCEEQYGSTYR |
| | | | | CVSVLTVLHQDWLNGKEYKCKVSNKALPAPIE |
| | | | | KTISKAKGQPREPQVYTLPPSREEMTKNQVSLT |
| | | | | CLVKGFYPSDIAVEWESNGQPENNYKTTPPVL |
| | | | | DSDGSFFLYSKLTVDKSRWQQGNVFSCSVMHE |
| | | | | ALHNHYTQKSLSLSPGKGGGGQGGGGQGGGG |
| | | | | QGGGGQGGGGQGGGGQCPPCPAPELLGGPSV |
| | | | | FLFPPKPKDTLMISRTPEVTCVVVDVSHEEPEV |
| | | | | KFNWYVDGVEVHNAKTKPCEEQYGSTYRCVS |
| | | | | VLTVLHQDWLNGKEYKCKVSNKALPAPIEKTI |
| | | | | SKAKGQPREPQVYTLPPSREEMTKNQVSLTCL |
| | | | | VKGFYPSDIAVEWESNGQPENNYKTTPPVLDS |
| | | | | DGSFFLYSKLTVDKSRWQQGNVFSCSVMHEA |
| | | | | LHNHYTQKSLSLSPGKGGGGEVQLLESGGGLV |
| | | | | QPGGSLRLSCAASGFSFSSYPINWVRQAPGKCL |
| | | | | EWVGVIWTGGGTNYASSVKGRFTISRDNSKNT |
| | | | | VYLQMNSLRAEDTAVYYCAKSRGVYDFKGRG |
| | | | | AMDYWGQGTLVTVSSGGGGQGGGGQGGGGQ |
| | | | | DIVMTQSPDSLAVSLGERATINCKSSQSLLYSS |
| | | | | NQKNYFAWYQQKPGQPPKLLIYWASTRESGV |
| | | | | PDRFSGSGSGTDFTLTISSLQAEDVAVYYCQQY |
| | | | | YSYPYTFGCGTKLEIKSGGGGQEVQLVESGGG |
| | | | | LVQPGGSLKLSCAASGFTFNKYAMNWVRQAP |
| | | | | GKGMEWVARIRSKYNNYATYYADAVKDRFTI |
| | | | | SRDDSKNTLYLQMNNLKTEDTAVYYCVRAGN |
| | | | | FGSSYISYFAYWGQGTLVTVSSGGGGQGGGGQ |
| | | | | GGGGQQTVVTQEPSLTVSPGGTVTITCGSSTGA |
| | | | | VTSGNYPNWIQKKPGQAPRGLIGGTKFLAPGT |
| | | | | PARFSGSLEGGKAALTLSGVQPEDEAEYYCVL |
| | | | | YYSNRWVFGSGTKLTVL |
| 277. | MS 15-B12 CC x | artificial | Aa | QVQLQESGPGLVKPSETLSLTCTVSGGSISSSSY |
| | I2L x G4 x scFc | | | FWGWIRQPPGKCLEWIGNIYYSGSSNYNPSLKS |
| | xG4 x CH3 15- | | | RVTISVDTSKNQFSLKLSSVTAADTAVYYCAR |
| | E11 CC x I2L | | | LPRGDRDAFDIWGQGTMVTVSSGGGGQGGGG |
| | _GQ - Full | | | QGGGGQDIVMTQSPSSLSASVGDRVTITCRASQ |
| | Sequence | | | GISNYLAWYQQKPGKVPKLLIYAASTLQSGVP |
| | | | | SRFSGSGSGTDFTLTISSLQPEDFATYYCQQSYS |
| | | | | TPFTFGCGTKVEIKSGGGGQEVQLVESGGGLV |
| | | | | QPGGSLKLSCAASGFTFNKYAMNWVRQAPGK |
| | | | | GMEWVARIRSKYNNYATYYADAVKDRFTISR |
| | | | | DDSKNTLYLQMNNLKTEDTAVYYCVRAGNFG |
| | | | | SSYISYFAYWGQGTLVTVSSGGGGQGGGGQG |
| | | | | GGGQQTVVTQEPSLTVSPGGTVTITCGSSTGAV |
| | | | | TSGNYPNWIQKKPGQAPRGLIGGTKFLAPGTP |
| | | | | ARFSGSLEGGKAALTLSGVQPEDEAEYYCVLY |
| | | | | YSNRWVFGSGTKLTVLGGGGCPPCPAPELLGG |
| | | | | PSVFLFPPKPKDTLMISRTPEVTCVVVDVSHEE |
| | | | | PEVKFNWYVDGVEVHNAKTKPCEEQYGSTYR |
| | | | | CVSVLTVLHQDWLNGKEYKCKVSNKALPAPIE |
| | | | | KTISKAKGQPREPQVYTLPPSREEMTKNQVSLT |
| | | | | CLVKGFYPSDIAVEWESNGQPENNYKTTPPVL |
| | | | | DSDGSFFLYSKLTVDKSRWQQGNVFSCSVMHE |
| | | | | ALHNHYTQKSLSLSPGKGGGGQGGGGQGGGG |
| | | | | QGGGGQGGGGQGGGGQCPPCPAPELLGGPSV |
| | | | | FLFPPKPKDTLMISRTPEVTCVVVDVSHEEPEV |
| | | | | KFNWYVDGVEVHNAKTKPCEEQYGSTYRCVS |
| | | | | VLTVLHQDWLNGKEYKCKVSNKALPAPIEKTI |
| | | | | SKAKGQPREPQVYTLPPSREEMTKNQVSLTCL |
| | | | | VKGFYPSDIAVEWESNGQPENNYKTTPPVLDS |
| | | | | DGSFFLYSKLTVDKSRWQQGNVFSCSVMHEA |
| | | | | LHNHYTQKSLSLSPGKGGGGQVQLVQSGAEV |
| | | | | KKPGASVKVSCKASGYTFTNYWMNWVRQAP |
| | | | | GQCLEWMGNIAYGVKGTNYNQKFQGRVTMT |
| | | | | VDTSSSTAYMELSRLRSDDTAVYYCATRYFYV |
| | | | | MDYWGQGTLVTVSSGGGGQGGGGQGGGGQD |
| | | | | IQMTQSPSSLSASVGDRVTITCRASQDISNYLN |
| | | | | WYQQKPGKVPKLLIYYTSRLHSGVPSRFSGSGS |
| | | | | GTDFTLTISSLQPEDVATYYCVQYAQFPLTFGC |
| | | | | GTKVEIKSGGGGQEVQLVESGGGLVQPGGSLK |
| | | | | LSCAASGFTFNKYAMNWVRQAPGKGMEWVA |
| | | | | RIRSKYNNYATYYADAVKDRFTISRDDSKNTL |
| | | | | YLQMNNLKTEDTAVYYCVRAGNFGSSYISYFA |
| | | | | YWGQGTLVTVSSGGGGQGGGGQGGGGQQTV |
| | | | | VTQEPSLTVSPGGTVTITCGSSTGAVTSGNYPN |
| | | | | WIQKKPGQAPRGLIGGTKFLAPGTPARFSGSLE |
| | | | | GGKAALTLSGVQPEDEAEYYCVLYYSNRWVF |
| | | | | GSGTKLTVL |
| 278. | MS 15-B12 CC x | artificial | Aa | QVQLQESGPGLVKPSETLSLTCTVSGGSISSSSY |
| | I2L x G4S3 x scFc | | | FWGWIRQPPGKCLEWIGNIYYSGSSNYNPSLKS |
| | x G4S3 x CH3 26- | | | RVTISVDTSKNQFSLKLSSVTAADTAVYYCAR |
| | E5 CC x I2L - Full | | | LPRGDRDAFDIWGQGTMVTVSSGGGGSGGGG |
| | Sequence | | | SGGGGSDIVMTQSPSSLSASVGDRVTITCRASQ |
| | | | | GISNYLAWYQQKPGKVPKLLIYAASTLQSGVP |
| | | | | SRFSGSGSGTDFTLTISSLQPEDFATYYCQQSYS |
| | | | | TPFTFGCGTKVEIKSGGGGSEVQLVESGGGLV |
| | | | | QPGGSLKLSCAASGFTFNKYAMNWVRQAPGK |
| | | | | GMEWVARIRSKYNNYATYYADAVKDRFTISR |
| | | | | DDSKNTLYLQMNNLKTEDTAVYYCVRAGNFG |
| | | | | SSYISYFAYWGQGTLVTVSSGGGGSGGGGSGG |
| | | | | GGSQTVVTQEPSLTVSPGGTVTITCGSSTGAVT |
| | | | | SGNYPNWIQKKPGQAPRGLIGGTKFLAPGTPA |
| | | | | RFSGSLEGGKAALTLSGVQPEDEAEYYCVLYY |
| | | | | SNRWVFGSGTKLTVLGGGGSGGGGSGGGGSD |
| | | | | KTHTCPPCPAPELLGGPSVFLFPPKPKDTLMISR |
| | | | | TPEVTCVVVDVSHEDPEVKFNWYVDGVEVHN |
| | | | | AKTKPCEEQYGSTYRCVSVLTVLHQDWLNGK |
| | | | | EYKCKVSNKALPAPIEKTISKAKGQPREPQVYT |
| | | | | LPPSREEMTKNQVSLTCLVKGFYPSDIAVEWES |
| | | | | NGQPENNYKTTPPVLDSDGSFFLYSKLTVDKS |
| | | | | RWQQGNVFSCSVMHEALHNHYTQKSLSLSPG |
| | | | | KGGGGSGGGGSGGGGSGGGGSGGGGSGGGGS |
| | | | | DKTHTCPPCPAPELLGGPSVFLFPPKPKDTLMIS |
| | | | | RTPEVTCVVVDVSHEDPEVKFNWYVDGVEVH |
| | | | | NAKTKPCEEQYGSTYRCVSVLTVLHQDWLNG |
| | | | | KEYKCKVSNKALPAPIEKTISKAKGQPREPQVY |
| | | | | TLPPSREEMTKNQVSLTCLVKGFYPSDIAVEWE |
| | | | | SNGQPENNYKTTPPVLDSDGSFFLYSKLTVDKS |
| | | | | RWQQGNVFSCSVMHEALHNHYTQKSLSLSPG |
| | | | | KGGGGSGGGGSGGGGSQVQLVQSGAEVKKPG |
| | | | | ASVKVSCKASGYTFTSYWMHWVRQAPGQCLE |
| | | | | WMGVIRTSTSYTIYNQKFKGRVTMTRDTSTST |
| | | | | VYMELSSLRSEDTAVYYCARSGPGYFDVWGQ |
| | | | | GTMVTVSSGGGGSGGGGSGGGGSDIQLTQSPS |
| | | | | FLSASVGDRVTITCRASENIYSYLAWYQQKPG |
| | | | | KAPKLLIYNAKTLAEGVPSRFSGSGSGTEFTLTI |
| | | | | SSLQPEDFATYYCQHNYGTPYTFGCGTKLEIKS |
| | | | | GGGGSEVQLVESGGGLVQPGGSLKLSCAASGF |
| | | | | TFNKYAMNWVRQAPGKGMEWVARIRSKYNN |
| | | | | YATYYADAVKDRFTISRDDSKNTLYLQMNNL |
| | | | | KTEDTAVYYCVRAGNFGSSYISYFAYWGQGTL |
| | | | | VTVSSGGGGSGGGGSGGGGSQTVVTQEPSLTV |
| | | | | SPGGTVTITCGSSTGAVTSGNYPNWIQKKPGQ |
| | | | | APRGLIGGTKFLAPGTPARFSGSLEGGKAALTL |
| | | | | SGVQPEDEAEYYCVLYYSNRWVFGSGTKLTV |
| | | | | L |
| 279. | MS 15-B12 CC x | artificial | aa | QVQLQESGPGLVKPSETLSLTCTVSGGSISSSSY |
| | I2Lx G4S3 x scFc | | | FWGWIRQPPGKCLEWIGNIYYSGSSNYNPSLKS |
| | x G4S3 x CH3 24- | | | RVTISVDTSKNQFSLKLSSVTAADTAVYYCAR |
| | D7 CC x I2L - | | | LPRGDRDAFDIWGQGTMVTVSSGGGGSGGGG |
| | Full Sequence | | | SGGGGSDIVMTQSPSSLSASVGDRVTITCRASQ |
| | | | | GISNYLAWYQQKPGKVPKLLIYAASTLQSGVP |
| | | | | SRFSGSGSGTDFTLTISSLQPEDFATYYCQQSYS |
| | | | | TPFTFGCGTKVEIKSGGGGSEVQLVESGGGLV |
| | | | | QPGGSLKLSCAASGFTFNKYAMNWVRQAPGK |
| | | | | GMEWVARIRSKYNNYATYYADAVKDRFTISR |
| | | | | DDSKNTLYLQMNNLKTEDTAVYYCVRAGNFG |
| | | | | SSYISYFAYWGQGTLVTVSSGGGGSGGGGSGG |
| | | | | GGSQTVVTQEPSLTVSPGGTVTITCGSSTGAVT |
| | | | | SGNYPNWIQKKPGQAPRGLIGGTKFLAPGTPA |
| | | | | RFSGSLEGGKAALTLSGVQPEDEAEYYCVLYY |
| | | | | SNRWVFGSGTKLTVLGGGGSGGGGSGGGGSD |
| | | | | KTHTCPPCPAPELLGGPSVFLFPPKPKDTLMISR |
| | | | | TPEVTCVVVDVSHEDPEVKFNWYVDGVEVHN |
| | | | | AKTKPCEEQYGSTYRCVSVLTVLHQDWLNGK |
| | | | | EYKCKVSNKALPAPIEKTISKAKGQPREPQVYT |
| | | | | LPPSREEMTKNQVSLTCLVKGFYPSDIAVEWES |
| | | | | NGQPENNYKTTPPVLDSDGSFFLYSKLTVDKS |
| | | | | RWQQGNVFSCSVMHEALHNHYTQKSLSLSPG |
| | | | | KGGGGSGGGGSGGGGSGGGGSGGGGSGGGGS |
| | | | | DKTHTCPPCPAPELLGGPSVFLFPPKPKDTLMIS |
| | | | | RTPEVTCVVVDVSHEDPEVKFNWYVDGVEVH |
| | | | | NAKTKPCEEQYGSTYRCVSVLTVLHQDWLNG |
| | | | | KEYKCKVSNKALPAPIEKTISKAKGQPREPQVY |
| | | | | TLPPSREEMTKNQVSLTCLVKGFYPSDIAVEWE |
| | | | | SNGQPENNYKTTPPVLDSDGSFFLYSKLTVDKS |
| | | | | RWQQGNVFSCSVMHEALHNHYTQKSLSLSPG |
| | | | | KGGGGSGGGGSGGGGSQVQLVQSGAEVKKPG |
| | | | | ASVKVSCKASGYTFTNYWMNWVRQAPGQCL |
| | | | | EWMGNIHSKAHGTNYNQKFQGRVTMTVDTSS |
| | | | | STAYMELSRLRSDDTAVYYCATRYFYVMDYW |
| | | | | GQGTLVTVSSGGGGSGGGGSGGGGSDIQMTQS |
| | | | | PSSLSASVGDRVTITCRASQDISNYLNWYQQKP |
| | | | | GKVPKLLIYYTSRLHSGVPSRFSGSGSGTDFTL |
| | | | | TISSLQPEDVATYYCVQYAQFPLTFGCGTKVEI |
| | | | | KSGGGGSEVQLVESGGGLVQPGGSLKLSCAAS |
| | | | | GFTFNKYAMNWVRQAPGKGMEWVARIRSKY |
| | | | | NNYATYYADAVKDRFTISRDDSKNTLYLQMN |
| | | | | NLKTEDTAVYYCVRAGNFGSSYISYFAYWGQ |
| | | | | GTLVTVSSGGGGSGGGGSGGGGSQTVVTQEPS |
| | | | | LTVSPGGTVTITCGSSTGAVTSGNYPNWIQKKP |
| | | | | GQAPRGLIGGTKFLAPGTPARFSGSLEGGKAAL |
| | | | | TLSGVQPEDEAEYYCVLYYSNRWVFGSGTKLT |
| | | | | VL |
| 280. | MS 15-B12 CC x | artificial | aa | QVQLQESGPGLVKPSETLSLTCTVSGGSISSSSY |
| | I2M2 x G4 x scfc | | | FWGWIRQPPGKCLEWIGNIYYSGSSNYNPSLKS |
| | x G4 x CH3 15- | | | RVTISVDTSKNQFSLKLSSVTAADTAVYYCAR |
| | E11 CC xI2M2 - | | | LPRGDRDAFDIWGQGTMVTVSSGGGGSGGGG |
| | Full Sequence | | | SGGGGSDIVMTQSPSSLSASVGDRVTITCRASQ |
| | | | | GISNYLAWYQQKPGKVPKLLIYAASTLQSGVP |
| | | | | SRFSGSGSGTDFTLTISSLQPEDFATYYCQQSYS |
| | | | | TPFTFGCGTKVEIKSGGGGSEVQLVESGGGLV |
| | | | | QPGGSLKLSCAASGFTFNKYAINWVREAPGKG |
| | | | | LEWVARIRSKYNNYATYYADAVKDRFTISRDD |
| | | | | SKNTAYLQMNNLKTEDTAVYYCVRNANFGTS |
| | | | | YISYFAYWGQGTLVTVSSGGGGSGGGGSGGG |
| | | | | GSQTVVTQEPSLTVSPGGTVTLTCGSSTGAVTS |
| | | | | GNYPNWVQKKPGQAPRGLIGGTKFLAPGTPAR |
| | | | | FSGSLLGGKAALTLSGVQPEDEAEYYCVLWYS |
| | | | | NRWVFGSGTKLTVLGGGGDKTHTCPPCPAPEL |
| | | | | LGGPSVFLFPPKPKDTLMISRTPEVTCVVVDVS |
| | | | | HEDPEVKFNWYVDGVEVHNAKTKPCEEQYGS |
| | | | | TYRCVSVLTVLHQDWLNGKEYKCKVSNKALP |
| | | | | APIEKTISKAKGQPREPQVYTLPPSREEMTKNQ |
| | | | | VSLTCLVKGFYPSDIAVEWESNGQPENNYKTT |
| | | | | PPVLDSDGSFFLYSKLTVDKSRWQQGNVFSCS |
| | | | | VMHEALHNHYTQKSLSLSPGKGGGGSGGGGS |
| | | | | GGGGSGGGGSGGGGSGGGGSDKTHTCPPCPAP |
| | | | | ELLGGPSVFLFPPKPKDTLMISRTPEVTCVVVD |
| | | | | VSHEDPEVKFNWYVDGVEVHNAKTKPCEEQY |
| | | | | GSTYRCVSVLTVLHQDWLNGKEYKCKVSNKA |
| | | | | LPAPIEKTISKAKGQPREPQVYTLPPSREEMTK |
| | | | | NQVSLTCLVKGFYPSDIAVEWESNGQPENNYK |
| | | | | TTPPVLDSDGSFFLYSKLTVDKSRWQQGNVFS |
| | | | | CSVMHEALHNHYTQKSLSLSPGKGGGGQVQL |
| | | | | VQSGAEVKKPGASVKVSCKASGYTFTNYWMN |
| | | | | WVRQAPGQCLEWMGNIAYGVKGTNYNQKFQ |
| | | | | GRVTMTVDTSSSTAYMELSRLRSDDTAVYYC |
| | | | | ATRYFYVMDYWGQGTLVTVSSGGGGSGGGGS |
| | | | | GGGGSDIQMTQSPSSLSASVGDRVTITCRASQD |
| | | | | ISNYLNWYQQKPGKVPKLLIYYTSRLHSGVPSR |
| | | | | FSGSGSGTDFTLTISSLQPEDVATYYCVQYAQF |
| | | | | PLTFGCGTKVEIKSGGGGSEVQLVESGGGLVQ |
| | | | | PGGSLKLSCAASGFTFNKYAINWVREAPGKGL |
| | | | | EWVARIRSKYNNYATYYADAVKDRFTISRDDS |
| | | | | KNTAYLQMNNLKTEDTAVYYCVRNANFGTSY |
| | | | | ISYFAYWGQGTLVTVSSGGGGSGGGGSGGGGS |
| | | | | QTVVTQEPSLTVSPGGTVTLTCGSSTGAVTSGN |
| | | | | YPNWVQKKPGQAPRGLIGGTKFLAPGTPARFS |
| | | | | GSLLGGKAALTLSGVQPEDEAEYYCVLWYSN |
| | | | | RWVFGSGTKLTVL |
| 281. | MS 15-B12 CC x | artificial | aa | QVQLQESGPGLVKPSETLSLTCTVSGGSISSSSY |
| | I2M2 x (G4Q)3x | | | FWGWIRQPPGKCLEWIGNIYYSGSSNYNPSLKS |
| | scFcmod x | | | RVTISVDTSKNQFSLKLSSVTAADTAVYYCAR |
| | (G4Q)3 x CH3 22- | | | LPRGDRDAFDIWGQGTMVTVSSGGGGQGGGG |
| | A12 CC x | | | QGGGGQDIVMTQSPSSLSASVGDRVTITCRASQ |
| | I2M2_GQ - Full | | | GISNYLAWYQQKPGKVPKLLIYAASTLQSGVP |
| | Sequence | | | SRFSGSGSGTDFTLTISSLQPEDFATYYCQQSYS |
| | | | | TPFTFGCGTKVEIKSGGGGQEVQLVESGGGLV |
| | | | | QPGGSLKLSCAASGFTFNKYAINWVREAPGKG |
| | | | | LEWVARIRSKYNNYATYYADAVKDRFTISRDD |
| | | | | SKNTAYLQMNNLKTEDTAVYYCVRNANFGTS |
| | | | | YISYFAYWGQGTLVTVSSGGGGQGGGGQGGG |
| | | | | GQQTVVTQEPSLTVSPGGTVTLTCGSSTGAVTS |
| | | | | GNYPNWVQKKPGQAPRGLIGGTKFLAPGTPAR |
| | | | | FSGSLLGGKAALTLSGVQPEDEAEYYCVLWYS |
| | | | | NRWVFGSGTKLTVLGGGGQGGGGQGGGGQC |
| | | | | PPCPAPELLGGPSVFLFPPKPKDTLMISRTPEVT |
| | | | | CVVVDVSHEEPEVKFNWYVDGVEVHNAKTKP |
| | | | | CEEQYGSTYRCVSVLTVLHQDWLNGKEYKCK |
| | | | | VSNKALPAPIEKTISKAKGQPREPQVYTLPPSRE |
| | | | | EMTKNQVSLTCLVKGFYPSDIAVEWESNGQPE |
| | | | | NNYKTTPPVLDSDGSFFLYSKLTVDKSRWQQG |
| | | | | NVFSCSVMHEALHNHYTQKSLSLSPGKGGGG |
| | | | | QGGGGQGGGGQGGGGQGGGGQGGGGQCPPC |
| | | | | PAPELLGGPSVFLFPPKPKDTLMISRTPEVTCVV |
| | | | | VDVSHEEPEVKFNWYVDGVEVHNAKTKPCEE |
| | | | | QYGSTYRCVSVLTVLHQDWLNGKEYKCKVSN |
| | | | | KALPAPIEKTISKAKGQPREPQVYTLPPSREEM |
| | | | | TKNQVSLTCLVKGFYPSDIAVEWESNGQPENN |
| | | | | YKTTPPVLDSDGSFFLYSKLTVDKSRWQQGNV |
| | | | | FSCSVMHEALHNHYTQKSLSLSPGKGGGGQG |
| | | | | GGGQGGGGQQVQLVQSGAEVVKPGASVKVSC |
| | | | | KASGYTFTSSWMNWVRQAPGQCLEWMGRIYT |
| | | | | GTGETKYSGKFQGRVTITRDTSASTAYMELSSL |
| | | | | TSEDTAVYYCARQRDYGALYAMDYWGQGTL |
| | | | | VTVSSGGGGQGGGGQGGGGQDIQLTQSPSFLS |
| | | | | ASVGDRVTITCRASDDIYSYLAWYQQKPGKAP |
| | | | | KLLVYNAKTLAEGVPSRFSGSGSGTEFTLTISSL |
| | | | | QPEDFATYYCQNHDRTPFTFGCGTKVDIKSGG |
| | | | | GGQEVQLVESGGGLVQPGGSLKLSCAASGFTF |
| | | | | NKYAINWVREAPGKGLEWVARIRSKYNNYAT |
| | | | | YYADAVKDRFTISRDDSKNTAYLQMNNLKTE |
| | | | | DTAVYYCVRNANFGTSYISYFAYWGQGTLVT |
| | | | | VSSGGGGQGGGGQGGGGQQTVVTQEPSLTVS |
| | | | | PGGTVTLTCGSSTGAVTSGNYPNWVQKKPGQ |
| | | | | APRGLIGGTKFLAPGTPARFSGSLLGGKAALTL |
| | | | | SGVQPEDEAEYYCVLWYSNRWVFGSGTKLTV |
| | | | | L |
| 282. | MS 15-B12 CC x | artificial | aa | QVQLQESGPGLVKPSETLSLTCTVSGGSISSSSY |
| | I2M2 x (G4Q)3x | | | FWGWIRQPPGKCLEWIGNIYYSGSSNYNPSLKS |
| | scFcmod x | | | RVTISVDTSKNQFSLKLSSVTAADTAVYYCAR |
| | (G4Q3) x CH3 15- | | | LPRGDRDAFDIWGQGTMVTVSSGGGGQGGGG |
| | E11 CC x I2M2 - | | | QGGGGQDIVMTQSPSSLSASVGDRVTITCRASQ |
| | Full Sequence | | | GISNYLAWYQQKPGKVPKLLIYAASTLQSGVP |
| | | | | SRFSGSGSGTDFTLTISSLQPEDFATYYCQQSYS |
| | | | | TPFTFGCGTKVEIKSGGGGQEVQLVESGGGLV |
| | | | | QPGGSLKLSCAASGFTFNKYAINWVREAPGKG |
| | | | | LEWVARIRSKYNNYATYYADAVKDRFTISRDD |
| | | | | SKNTAYLQMNNLKTEDTAVYYCVRNANFGTS |
| | | | | YISYFAYWGQGTLVTVSSGGGGQGGGGQGGG |
| | | | | GQQTVVTQEPSLTVSPGGTVTLTCGSSTGAVTS |
| | | | | GNYPNWVQKKPGQAPRGLIGGTKFLAPGTPAR |
| | | | | FSGSLLGGKAALTLSGVQPEDEAEYYCVLWYS |
| | | | | NRWVFGSGTKLTVLGGGGQGGGGQGGGGQC |
| | | | | PPCPAPELLGGPSVFLFPPKPKDTLMISRTPEVT |
| | | | | CVVVDVSHEEPEVKFNWYVDGVEVHNAKTKP |
| | | | | CEEQYGSTYRCVSVLTVLHQDWLNGKEYKCK |
| | | | | VSNKALPAPIEKTISKAKGQPREPQVYTLPPSRE |
| | | | | EMTKNQVSLTCLVKGFYPSDIAVEWESNGQPE |
| | | | | NNYKTTPPVLDSDGSFFLYSKLTVDKSRWQQG |
| | | | | NVFSCSVMHEALHNHYTQKSLSLSPGKGGGG |
| | | | | QGGGGQGGGGQGGGGQGGGGQGGGGQCPPC |
| | | | | PAPELLGGPSVFLFPPKPKDTLMISRTPEVTCVV |
| | | | | VDVSHEEPEVKFNWYVDGVEVHNAKTKPCEE |
| | | | | QYGSTYRCVSVLTVLHQDWLNGKEYKCKVSN |
| | | | | KALPAPIEKTISKAKGQPREPQVYTLPPSREEM |
| | | | | TKNQVSLTCLVKGFYPSDIAVEWESNGQPENN |
| | | | | YKTTPPVLDSDGSFFLYSKLTVDKSRWQQGNV |
| | | | | FSCSVMHEALHNHYTQKSLSLSPGKGGGGQG |
| | | | | GGGQGGGGQQVQLVQSGAEVKKPGASVKVSC |
| | | | | KASGYTFTNYWMNWVRQAPGQCLEWMGNIA |
| | | | | YGVKGTNYNQKFQGRVTMTVDTSSSTAYMEL |
| | | | | SRLRSDDTAVYYCATRYFYVMDYWGQGTLVT |
| | | | | VSSGGGGQGGGGQGGGGQDIQMTQSPSSLSAS |
| | | | | VGDRVTITCRASQDISNYLNWYQQKPGKVPKL |
| | | | | LIYYTSRLHSGVPSRFSGSGSGTDFTLTISSLQPE |
| | | | | DVATYYCVQYAQFPLTFGCGTKVEIKSGGGGQ |
| | | | | EVQLVESGGGLVQPGGSLKLSCAASGFTFNKY |
| | | | | AINWVREAPGKGLEWVARIRSKYNNYATYYA |
| | | | | DAVKDRFTISRDDSKNTAYLQMNNLKTEDTA |
| | | | | VYYCVRNANFGTSYISYFAYWGQGTLVTVSSG |
| | | | | GGGQGGGGQGGGGQQTVVTQEPSLTVSPGGT |
| | | | | VTLTCGSSTGAVTSGNYPNWVQKKPGQAPRG |
| | | | | LIGGTKFLAPGTPARFSGSLLGGKAALTLSGVQ |
| | | | | PEDEAEYYCVLWYSNRWVFGSGTKLTVL |
| 283. | MS 15-B12 CC x | artificial | aa | QVQLQESGPGLVKPSETLSLTCTVSGGSISSSSY |
| | I2M2 x G4 x scFc | | | FWGWIRQPPGKCLEWIGNIYYSGSSNYNPSLKS |
| | x G4 x CH3 005- | | | RVTISVDTSKNQFSLKLSSVTAADTAVYYCAR |
| | D5 CC x | | | LPRGDRDAFDIWGQGTMVTVSSGGGGQGGGG |
| | I2M2_GQ - Full | | | QGGGGQDIVMTQSPSSLSASVGDRVTITCRASQ |
| | Sequence | | | GISNYLAWYQQKPGKVPKLLIYAASTLQSGVP |
| | | | | SRFSGSGSGTDFTLTISSLQPEDFATYYCQQSYS |
| | | | | TPFTFGCGTKVEIKSGGGGQEVQLVESGGGLV |
| | | | | QPGGSLKLSCAASGFTFNKYAINWVREAPGKG |
| | | | | LEWVARIRSKYNNYATYYADAVKDRFTISRDD |
| | | | | SKNTAYLQMNNLKTEDTAVYYCVRNANFGTS |
| | | | | YISYFAYWGQGTLVTVSSGGGGQGGGGQGGG |
| | | | | GQQTVVTQEPSLTVSPGGTVTLTCGSSTGAVTS |
| | | | | GNYPNWVQKKPGQAPRGLIGGTKFLAPGTPAR |
| | | | | FSGSLLGGKAALTLSGVQPEDEAEYYCVLWYS |
| | | | | NRWVFGSGTKLTVLGGGGCPPCPAPELLGGPS |
| | | | | VFLFPPKPKDTLMISRTPEVTCVVVDVSHEEPE |
| | | | | VKFNWYVDGVEVHNAKTKPCEEQYGSTYRCV |
| | | | | SVLTVLHQDWLNGKEYKCKVSNKALPAPIEKT |
| | | | | ISKAKGQPREPQVYTLPPSREEMTKNQVSLTCL |
| | | | | VKGFYPSDIAVEWESNGQPENNYKTTPPVLDS |
| | | | | DGSFFLYSKLTVDKSRWQQGNVFSCSVMHEA |
| | | | | LHNHYTQKSLSLSPGKGGGGQGGGGQGGGGQ |
| | | | | GGGGQGGGGQGGGGQCPPCPAPELLGGPSVFL |
| | | | | FPPKPKDTLMISRTPEVTCVVVDVSHEEPEVKF |
| | | | | NWYVDGVEVHNAKTKPCEEQYGSTYRCVSVL |
| | | | | TVLHQDWLNGKEYKCKVSNKALPAPIEKTISK |
| | | | | AKGQPREPQVYTLPPSREEMTKNQVSLTCLVK |
| | | | | GFYPSDIAVEWESNGQPENNYKTTPPVLDSDG |
| | | | | SFFLYSKLTVDKSRWQQGNVFSCSVMHEALH |
| | | | | NHYTQKSLSLSPGKGGGGEVQLLESGGGLVQP |
| | | | | GGSLRLSCAASGFSFSSYPINWVRQAPGKCLE |
| | | | | WVGVIWTGGGTNYASSVKGRFTISRDNSKNTV |
| | | | | YLQMNSLRAEDTAVYYCAKSRGVYDFKGRGA |
| | | | | MDYWGQGTLVTVSSGGGGQGGGGQGGGGQD |
| | | | | IVMTQSPDSLAVSLGERATINCKSSQSLLYSSN |
| | | | | QKNYFAWYQQKPGQPPKLLIYWASTRESGVP |
| | | | | DRFSGSGSGTDFTLTISSLQAEDVAVYYCQQY |
| | | | | YSYPYTFGCGTKLEIKSGGGGQEVQLVESGGG |
| | | | | LVQPGGSLKLSCAASGFTFNKYAINWVREAPG |
| | | | | KGLEWVARIRSKYNNYATYYADAVKDRFTISR |
| | | | | DDSKNTAYLQMNNLKTEDTAVYYCVRNANFG |
| | | | | TSYISYFAYWGQGTLVTVSSGGGGQGGGGQG |
| | | | | GGGQQTVVTQEPSLTVSPGGTVTLTCGSSTGA |
| | | | | VTSGNYPNWVQKKPGQAPRGLIGGTKFLAPGT |
| | | | | PARFSGSLLGGKAALTLSGVQPEDEAEYYCVL |
| | | | | WYSNRWVFGSGTKLTVL |
| 284. | MS 15-B12 CC x | artificial | aa | QVQLQESGPGLVKPSETLSLTCTVSGGSISSSSY |
| | I2M2 x G4 x scFc | | | FWGWIRQPPGKCLEWIGNIYYSGSSNYNPSLKS |
| | x G4 x CH3 22- | | | RVTISVDTSKNQFSLKLSSVTAADTAVYYCAR |
| | A12 CC x | | | LPRGDRDAFDIWGQGTMVTVSSGGGGQGGGG |
| | I2M2_GQ - Full | | | QGGGGQDIVMTQSPSSLSASVGDRVTITCRASQ |
| | Sequence | | | GISNYLAWYQQKPGKVPKLLIYAASTLQSGVP |
| | | | | SRFSGSGSGTDFTLTISSLQPEDFATYYCQQSYS |
| | | | | TPFTFGCGTKVEIKSGGGGQEVQLVESGGGLV |
| | | | | QPGGSLKLSCAASGFTFNKYAINWVREAPGKG |
| | | | | LEWVARIRSKYNNYATYYADAVKDRFTISRDD |
| | | | | SKNTAYLQMNNLKTEDTAVYYCVRNANFGTS |
| | | | | YISYFAYWGQGTLVTVSSGGGGQGGGGQGGG |
| | | | | GQQTVVTQEPSLTVSPGGTVTLTCGSSTGAVTS |
| | | | | GNYPNWVQKKPGQAPRGLIGGTKFLAPGTPAR |
| | | | | FSGSLLGGKAALTLSGVQPEDEAEYYCVLWYS |
| | | | | NRWVFGSGTKLTVLGGGGCPPCPAPELLGGPS |
| | | | | VFLFPPKPKDTLMISRTPEVTCVVVDVSHEEPE |
| | | | | VKFNWYVDGVEVHNAKTKPCEEQYGSTYRCV |
| | | | | SVLTVLHQDWLNGKEYKCKVSNKALPAPIEKT |
| | | | | ISKAKGQPREPQVYTLPPSREEMTKNQVSLTCL |
| | | | | VKGFYPSDIAVEWESNGQPENNYKTTPPVLDS |
| | | | | DGSFFLYSKLTVDKSRWQQGNVFSCSVMHEA |
| | | | | LHNHYTQKSLSLSPGKGGGGQGGGGQGGGGQ |
| | | | | GGGGQGGGGQGGGGQCPPCPAPELLGGPSVFL |
| | | | | FPPKPKDTLMISRTPEVTCVVVDVSHEEPEVKF |
| | | | | NWYVDGVEVHNAKTKPCEEQYGSTYRCVSVL |
| | | | | TVLHQDWLNGKEYKCKVSNKALPAPIEKTISK |
| | | | | AKGQPREPQVYTLPPSREEMTKNQVSLTCLVK |
| | | | | GFYPSDIAVEWESNGQPENNYKTTPPVLDSDG |
| | | | | SFFLYSKLTVDKSRWQQGNVFSCSVMHEALH |
| | | | | NHYTQKSLSLSPGKGGGGQVQLVQSGAEVVK |
| | | | | PGASVKVSCKASGYTFTSSWMNWVRQAPGQC |
| | | | | LEWMGRIYTGTGETKYSGKFQGRVTITRDTSA |
| | | | | STAYMELSSLTSEDTAVYYCARQRDYGALYA |
| | | | | MDYWGQGTLVTVSSGGGGQGGGGQGGGGQD |
| | | | | IQLTQSPSFLSASVGDRVTITCRASDDIYSYLAW |
| | | | | YQQKPGKAPKLLVYNAKTLAEGVPSRFSGSGS |
| | | | | GTEFTLTISSLQPEDFATYYCQNHDRTPFTFGC |
| | | | | GTKVDIKSGGGGQEVQLVESGGGLVQPGGSLK |
| | | | | LSCAASGFTFNKYAINWVREAPGKGLEWVARI |
| | | | | RSKYNNYATYYADAVKDRFTISRDDSKNTAYL |
| | | | | QMNNLKTEDTAVYYCVRNANFGTSYISYFAY |
| | | | | WGQGTLVTVSSGGGGQGGGGQGGGGQQTVV |
| | | | | TQEPSLTVSPGGTVTLTCGSSTGAVTSGNYPN |
| | | | | WVQKKPGQAPRGLIGGTKFLAPGTPARFSGSL |
| | | | | LGGKAALTLSGVQPEDEAEYYCVLWYSNRWV |
| | | | | FGSGTKLTVL |
| 285. | MS 15-B12 CC x | artificial | aa | QVQLQESGPGLVKPSETLSLTCTVSGGSISSSSY |
| | I2M2 x G4 x scFc | | | FWGWIRQPPGKCLEWIGNIYYSGSSNYNPSLKS |
| | x G4 x CH3 26-E5 | | | RVTISVDTSKNQFSLKLSSVTAADTAVYYCAR |
| | CC x I2M2_GQ - | | | LPRGDRDAFDIWGQGTMVTVSSGGGGQGGGG |
| | Full Sequence | | | QGGGGQDIVMTQSPSSLSASVGDRVTITCRASQ |
| | | | | GISNYLAWYQQKPGKVPKLLIYAASTLQSGVP |
| | | | | SRFSGSGSGTDFTLTISSLQPEDFATYYCQQSYS |
| | | | | TPFTFGCGTKVEIKSGGGGQEVQLVESGGGLV |
| | | | | QPGGSLKLSCAASGFTFNKYAINWVREAPGKG |
| | | | | LEWVARIRSKYNNYATYYADAVKDRFTISRDD |
| | | | | SKNTAYLQMNNLKTEDTAVYYCVRNANFGTS |
| | | | | YISYFAYWGQGTLVTVSSGGGGQGGGGQGGG |
| | | | | GQQTVVTQEPSLTVSPGGTVTLTCGSSTGAVTS |
| | | | | GNYPNWVQKKPGQAPRGLIGGTKFLAPGTPAR |
| | | | | FSGSLLGGKAALTLSGVQPEDEAEYYCVLWYS |
| | | | | NRWVFGSGTKLTVLGGGGCPPCPAPELLGGPS |
| | | | | VFLFPPKPKDTLMISRTPEVTCVVVDVSHEEPE |
| | | | | VKFNWYVDGVEVHNAKTKPCEEQYGSTYRCV |
| | | | | SVLTVLHQDWLNGKEYKCKVSNKALPAPIEKT |
| | | | | ISKAKGQPREPQVYTLPPSREEMTKNQVSLTCL |
| | | | | VKGFYPSDIAVEWESNGQPENNYKTTPPVLDS |
| | | | | DGSFFLYSKLTVDKSRWQQGNVFSCSVMHEA |
| | | | | LHNHYTQKSLSLSPGKGGGGQGGGGQGGGGQ |
| | | | | GGGGQGGGGQGGGGQCPPCPAPELLGGPSVFL |
| | | | | FPPKPKDTLMISRTPEVTCVVVDVSHEEPEVKF |
| | | | | NWYVDGVEVHNAKTKPCEEQYGSTYRCVSVL |
| | | | | TVLHQDWLNGKEYKCKVSNKALPAPIEKTISK |
| | | | | AKGQPREPQVYTLPPSREEMTKNQVSLTCLVK |
| | | | | GFYPSDIAVEWESNGQPENNYKTTPPVLDSDG |
| | | | | SFFLYSKLTVDKSRWQQGNVFSCSVMHEALH |
| | | | | NHYTQKSLSLSPGKGGGGQVQLVQSGAEVKK |
| | | | | PGASVKVSCKASGYTFTSYWMHWVRQAPGQC |
| | | | | LEWMGVIRTSTSYTIYNQKFKGRVTMTRDTST |
| | | | | STVYMELSSLRSEDTAVYYCARSGPGYFDVW |
| | | | | GQGTMVTVSSGGGGQGGGGQGGGGQDIQLTQ |
| | | | | SPSFLSASVGDRVTITCRASENIYSYLAWYQQK |
| | | | | PGKAPKLLIYNAKTLAEGVPSRFSGSGSGTEFT |
| | | | | LTISSLQPEDFATYYCQHNYGTPYTFGCGTKLE |
| | | | | IKSGGGGQEVQLVESGGGLVQPGGSLKLSCAA |
| | | | | SGFTFNKYAINWVREAPGKGLEWVARIRSKYN |
| | | | | NYATYYADAVKDRFTISRDDSKNTAYLQMNN |
| | | | | LKTEDTAVYYCVRNANFGTSYISYFAYWGQG |
| | | | | TLVTVSSGGGGQGGGGQGGGGQQTVVTQEPS |
| | | | | LTVSPGGTVTLTCGSSTGAVTSGNYPNWVQKK |
| | | | | PGQAPRGLIGGTKFLAPGTPARFSGSLLGGKAA |
| | | | | LTLSGVQPEDEAEYYCVLWYSNRWVFGSGTK |
| | | | | LTVL |
| 286. | MS 15-B12 CC x | artificial | aa | QVQLQESGPGLVKPSETLSLTCTVSGGSISSSSY |
| | I2M2 x G4S3 x | | | FWGWIRQPPGKCLEWIGNIYYSGSSNYNPSLKS |
| | scFc x G4S3 x | | | RVTISVDTSKNQFSLKLSSVTAADTAVYYCAR |
| | CH3 15-E11 CC x | | | LPRGDRDAFDIWGQGTMVTVSSGGGGSGGGG |
| | I2M2 - Full | | | SGGGGSDIVMTQSPSSLSASVGDRVTITCRASQ |
| | Sequence | | | GISNYLAWYQQKPGKVPKLLIYAASTLQSGVP |
| | | | | SRFSGSGSGTDFTLTISSLQPEDFATYYCQQSYS |
| | | | | TPFTFGCGTKVEIKSGGGGSEVQLVESGGGLV |
| | | | | QPGGSLKLSCAASGFTFNKYAINWVREAPGKG |
| | | | | LEWVARIRSKYNNYATYYADAVKDRFTISRDD |
| | | | | SKNTAYLQMNNLKTEDTAVYYCVRNANFGTS |
| | | | | YISYFAYWGQGTLVTVSSGGGGSGGGGSGGG |
| | | | | GSQTVVTQEPSLTVSPGGTVTLTCGSSTGAVTS |
| | | | | GNYPNWVQKKPGQAPRGLIGGTKFLAPGTPAR |
| | | | | FSGSLLGGKAALTLSGVQPEDEAEYYCVLWYS |
| | | | | NRWVFGSGTKLTVLGGGGSGGGGSGGGGSDK |
| | | | | THTCPPCPAPELLGGPSVFLFPPKPKDTLMISRT |
| | | | | PEVTCVVVDVSHEDPEVKFNWYVDGVEVHNA |
| | | | | KTKPCEEQYGSTYRCVSVLTVLHQDWLNGKE |
| | | | | YKCKVSNKALPAPIEKTISKAKGQPREPQVYTL |
| | | | | PPSREEMTKNQVSLTCLVKGFYPSDIAVEWES |
| | | | | NGQPENNYKTTPPVLDSDGSFFLYSKLTVDKS |
| | | | | RWQQGNVFSCSVMHEALHNHYTQKSLSLSPG |
| | | | | KGGGGSGGGGSGGGGSGGGGSGGGGSGGGGS |
| | | | | DKTHTCPPCPAPELLGGPSVFLFPPKPKDTLMIS |
| | | | | RTPEVTCVVVDVSHEDPEVKFNWYVDGVEVH |
| | | | | NAKTKPCEEQYGSTYRCVSVLTVLHQDWLNG |
| | | | | KEYKCKVSNKALPAPIEKTISKAKGQPREPQVY |
| | | | | TLPPSREEMTKNQVSLTCLVKGFYPSDIAVEWE |
| | | | | SNGQPENNYKTTPPVLDSDGSFFLYSKLTVDKS |
| | | | | RWQQGNVFSCSVMHEALHNHYTQKSLSLSPG |
| | | | | KGGGGSGGGGSGGGGSQVQLVQSGAEVKKPG |
| | | | | ASVKVSCKASGYTFTNYWMNWVRQAPGQCL |
| | | | | EWMGNIAYGVKGTNYNQKFQGRVTMTVDTSS |
| | | | | STAYMELSRLRSDDTAVYYCATRYFYVMDYW |
| | | | | GQGTLVTVSSGGGGSGGGGSGGGGSDIQMTQS |
| | | | | PSSLSASVGDRVTITCRASQDISNYLNWYQQKP |
| | | | | GKVPKLLIYYTSRLHSGVPSRFSGSGSGTDFTL |
| | | | | TISSLQPEDVATYYCVQYAQFPLTFGCGTKVEI |
| | | | | KSGGGGSEVQLVESGGGLVQPGGSLKLSCAAS |
| | | | | GFTFNKYAINWVREAPGKGLEWVARIRSKYN |
| | | | | NYATYYADAVKDRFTISRDDSKNTAYLQMNN |
| | | | | LKTEDTAVYYCVRNANFGTSYISYFAYWGQG |
| | | | | TLVTVSSGGGGSGGGGSGGGGSQTVVTQEPSL |
| | | | | TVSPGGTVTLTCGSSTGAVTSGNYPNWVQKKP |
| | | | | GQAPRGLIGGTKFLAPGTPARFSGSLLGGKAAL |
| | | | | TLSGVQPEDEAEYYCVLWYSNRWVFGSGTKL |
| | | | | TVL |
| 287. | MS 15-B12 CC x | artificial | Aa | QVQLQESGPGLVKPSETLSLTCTVSGGSISSSSY |
| | I2Ccc(44/100)x | | | FWGWIRQPPGKCLEWIGNIYYSGSSNYNPSLKS |
| | (G4S)3x scFcx | | | RVTISVDTSKNQFSLKLSSVTAADTAVYYCAR |
| | (G4S)3x CH3 14- | | | LPRGDRDAFDIWGQGTMVTVSSGGGGSGGGG |
| | D1 CCx | | | SGGGGSDIVMTQSPSSLSASVGDRVTITCRASQ |
| | I2Ccc(44/100) - | | | GISNYLAWYQQKPGKVPKLLIYAASTLQSGVP |
| | Full Sequence | | | SRFSGSGSGTDFTLTISSLQPEDFATYYCQQSYS |
| | | | | TPFTFGCGTKVEIKSGGGGSEVQLVESGGGLV |
| | | | | QPGGSLKLSCAASGFTFNKYAMNWVRQAPGK |
| | | | | CLEWVARIRSKYNNYATYYADSVKDRFTISRD |
| | | | | DSKNTAYLQMNNLKTEDTAVYYCVRHGNFGN |
| | | | | SYISYWAYWGQGTLVTVSSGGGGSGGGGSGG |
| | | | | GGSQTVVTQEPSLTVSPGGTVTLTCGSSTGAVT |
| | | | | SGNYPNWVQQKPGQAPRGLIGGTKFLAPGTPA |
| | | | | RFSGSLLGGKAALTLSGVQPEDEAEYYCVLWY |
| | | | | SNRWVFGCGTKLTVLGGGGSGGGGSGGGGSD |
| | | | | KTHTCPPCPAPELLGGPSVFLFPPKPKDTLMISR |
| | | | | TPEVTCVVVDVSHEDPEVKFNWYVDGVEVHN |
| | | | | AKTKPCEEQYGSTYRCVSVLTVLHQDWLNGK |
| | | | | EYKCKVSNKALPAPIEKTISKAKGQPREPQVYT |
| | | | | LPPSREEMTKNQVSLTCLVKGFYPSDIAVEWES |
| | | | | NGQPENNYKTTPPVLDSDGSFFLYSKLTVDKS |
| | | | | RWQQGNVFSCSVMHEALHNHYTQKSLSLSPG |
| | | | | KGGGGSGGGGSGGGGSGGGGSGGGGSGGGGS |
| | | | | DKTHTCPPCPAPELLGGPSVFLFPPKPKDTLMIS |
| | | | | RTPEVTCVVVDVSHEDPEVKFNWYVDGVEVH |
| | | | | NAKTKPCEEQYGSTYRCVSVLTVLHQDWLNG |
| | | | | KEYKCKVSNKALPAPIEKTISKAKGQPREPQVY |
| | | | | TLPPSREEMTKNQVSLTCLVKGFYPSDIAVEWE |
| | | | | SNGQPENNYKTTPPVLDSDGSFFLYSKLTVDKS |
| | | | | RWQQGNVFSCSVMHEALHNHYTQKSLSLSPG |
| | | | | KGGGGSGGGGSGGGGSQVQLVQSGAEVKKPG |
| | | | | ASVKVSCKASGYTFTSYWMHWVRQAPGQCLE |
| | | | | WMGVIYTSGSYTIYNQKFQGRVTMTRDTSTST |
| | | | | AYMELSSLRSEDTAVYYCARSGPGYFDVWGQ |
| | | | | GTMVTVSSGGGGSGGGGSGGGGSDIQLTQSPS |
| | | | | FLSASVGDRVTITCRASGNIHNYLAWYQQKPG |
| | | | | KAPKLLIYNAKTLAEGVPSRFSGSGSGTEFTLKI |
| | | | | SSLQPEDFATYYCQHFAWTPYTFGCGTKLEIKS |
| | | | | GGGGSEVQLVESGGGLVQPGGSLKLSCAASGF |
| | | | | TFNKYAMNWVRQAPGKCLEWVARIRSKYNN |
| | | | | YATYYADSVKDRFTISRDDSKNTAYLQMNNL |
| | | | | KTEDTAVYYCVRHGNFGNSYISYWAYWGQGT |
| | | | | LVTVSSGGGGSGGGGSGGGGSQTVVTQEPSLT |
| | | | | VSPGGTVTLTCGSSTGAVTSGNYPNWVQQKPG |
| | | | | QAPRGLIGGTKFLAPGTPARFSGSLLGGKAALT |
| | | | | LSGVQPEDEAEYYCVLWYSNRWVFGCGTKLT |
| | | | | VL |
| 288. | MS 15-B12 CC x | artificial | Aa | QVQLQESGPGLVKPSETLSLTCTVSGGSISSSSY |
| | I2L x (G4Q)3 x | | | FWGWIRQPPGKCLEWIGNIYYSGSSNYNPSLKS |
| | scfc x (G4Q)3 x | | | RVTISVDTSKNQFSLKLSSVTAADTAVYYCAR |
| | CH3 005-D5 CC x | | | LPRGDRDAFDIWGQGTMVTVSSGGGGQGGGG |
| | I2L - Full | | | QGGGGQDIVMTQSPSSLSASVGDRVTITCRASQ |
| | Sequence | | | GISNYLAWYQQKPGKVPKLLIYAASTLQSGVP |
| | | | | SRFSGSGSGTDFTLTISSLQPEDFATYYCQQSYS |
| | | | | TPFTFGCGTKVEIKSGGGGQEVQLVESGGGLV |
| | | | | QPGGSLKLSCAASGFTFNKYAMNWVRQAPGK |
| | | | | GMEWVARIRSKYNNYATYYADAVKDRFTISR |
| | | | | DDSKNTLYLQMNNLKTEDTAVYYCVRAGNFG |
| | | | | SSYISYFAYWGQGTLVTVSSGGGGQGGGGQG |
| | | | | GGGQQTVVTQEPSLTVSPGGTVTITCGSSTGAV |
| | | | | TSGNYPNWIQKKPGQAPRGLIGGTKFLAPGTP |
| | | | | ARFSGSLEGGKAALTLSGVQPEDEAEYYCVLY |
| | | | | YSNRWVFGSGTKLTVLGGGGQGGGGQGGGG |
| | | | | QCPPCPAPELLGGPSVFLFPPKPKDTLMISRTPE |
| | | | | VTCVVVDVSHEEPEVKFNWYVDGVEVHNAKT |
| | | | | KPCEEQYGSTYRCVSVLTVLHQDWLNGKEYK |
| | | | | CKVSNKALPAPIEKTISKAKGQPREPQVYTLPP |
| | | | | SREEMTKNQVSLTCLVKGFYPSDIAVEWESNG |
| | | | | QPENNYKTTPPVLDSDGSFFLYSKLTVDKSRW |
| | | | | QQGNVFSCSVMHEALHNHYTQKSLSLSPGKG |
| | | | | GGGQGGGGQGGGGQGGGGQGGGGQGGGGQ |
| | | | | CPPCPAPELLGGPSVFLFPPKPKDTLMISRTPEV |
| | | | | TCVVVDVSHEEPEVKFNWYVDGVEVHNAKTK |
| | | | | PCEEQYGSTYRCVSVLTVLHQDWLNGKEYKC |
| | | | | KVSNKALPAPIEKTISKAKGQPREPQVYTLPPS |
| | | | | REEMTKNQVSLTCLVKGFYPSDIAVEWESNGQ |
| | | | | PENNYKTTPPVLDSDGSFFLYSKLTVDKSRWQ |
| | | | | QGNVFSCSVMHEALHNHYTQKSLSLSPGKGG |
| | | | | GGQGGGGQGGGGQEVQLLESGGGLVQPGGSL |
| | | | | RLSCAASGFSFSSYPINWVRQAPGKCLEWVGVI |
| | | | | WTGGGTNYASSVKGRFTISRDNSKNTVYLQM |
| | | | | NSLRAEDTAVYYCAKSRGVYDFKGRGAMDY |
| | | | | WGQGTLVTVSSGGGGQGGGGQGGGGQDIVM |
| | | | | TQSPDSLAVSLGERATINCKSSQSLLYSSNQKN |
| | | | | YFAWYQQKPGQPPKLLIYWASTRESGVPDRFS |
| | | | | GSGSGTDFTLTISSLQAEDVAVYYCQQYYSYP |
| | | | | YTFGCGTKLEIKSGGGGQEVQLVESGGGLVQP |
| | | | | GGSLKLSCAASGFTFNKYAMNWVRQAPGKG |
| | | | | MEWVARIRSKYNNYATYYADAVKDRFTISRD |
| | | | | DSKNTLYLQMNNLKTEDTAVYYCVRAGNFGS |
| | | | | SYISYFAYWGQGTLVTVSSGGGGQGGGGQGG |
| | | | | GGQQTVVTQEPSLTVSPGGTVTITCGSSTGAVT |
| | | | | SGNYPNWIQKKPGQAPRGLIGGTKFLAPGTPA |
| | | | | RFSGSLEGGKAALTLSGVQPEDEAEYYCVLYY |
| | | | | SNRWVFGSGTKLTVL |
| 289. | MS 15-B12 CC x | artificial | Aa | QVQLQESGPGLVKPSETLSLTCTVSGGSISSSSY |
| | I2L x (G4Q)3 x | | | FWGWIRQPPGKCLEWIGNIYYSGSSNYNPSLKS |
| | scfc x (G4Q)3 x | | | RVTISVDTSKNQFSLKLSSVTAADTAVYYCAR |
| | CH3 26-E5 CC x | | | LPRGDRDAFDIWGQGTMVTVSSGGGGQGGGG |
| | I2L - Full | | | QGGGGQDIVMTQSPSSLSASVGDRVTITCRASQ |
| | Sequence | | | GISNYLAWYQQKPGKVPKLLIYAASTLQSGVP |
| | | | | SRFSGSGSGTDFTLTISSLQPEDFATYYCQQSYS |
| | | | | TPFTFGCGTKVEIKSGGGGQEVQLVESGGGLV |
| | | | | QPGGSLKLSCAASGFTFNKYAMNWVRQAPGK |
| | | | | GMEWVARIRSKYNNYATYYADAVKDRFTISR |
| | | | | DDSKNTLYLQMNNLKTEDTAVYYCVRAGNFG |
| | | | | SSYISYFAYWGQGTLVTVSSGGGGQGGGGQG |
| | | | | GGGQQTVVTQEPSLTVSPGGTVTITCGSSTGAV |
| | | | | TSGNYPNWIQKKPGQAPRGLIGGTKFLAPGTP |
| | | | | ARFSGSLEGGKAALTLSGVQPEDEAEYYCVLY |
| | | | | YSNRWVFGSGTKLTVLGGGGQGGGGQGGGG |
| | | | | QCPPCPAPELLGGPSVFLFPPKPKDTLMISRTPE |
| | | | | VTCVVVDVSHEEPEVKFNWYVDGVEVHNAKT |
| | | | | KPCEEQYGSTYRCVSVLTVLHQDWLNGKEYK |
| | | | | CKVSNKALPAPIEKTISKAKGQPREPQVYTLPP |
| | | | | SREEMTKNQVSLTCLVKGFYPSDIAVEWESNG |
| | | | | QPENNYKTTPPVLDSDGSFFLYSKLTVDKSRW |
| | | | | QQGNVFSCSVMHEALHNHYTQKSLSLSPGKG |
| | | | | GGGQGGGGQGGGGQGGGGQGGGGQGGGGQ |
| | | | | CPPCPAPELLGGPSVFLFPPKPKDTLMISRTPEV |
| | | | | TCVVVDVSHEEPEVKFNWYVDGVEVHNAKTK |
| | | | | PCEEQYGSTYRCVSVLTVLHQDWLNGKEYKC |
| | | | | KVSNKALPAPIEKTISKAKGQPREPQVYTLPPS |
| | | | | REEMTKNQVSLTCLVKGFYPSDIAVEWESNGQ |
| | | | | PENNYKTTPPVLDSDGSFFLYSKLTVDKSRWQ |
| | | | | QGNVFSCSVMHEALHNHYTQKSLSLSPGKGG |
| | | | | GGQGGGGQGGGGQQVQLVQSGAEVKKPGAS |
| | | | | VKVSCKASGYTFTSYWMHWVRQAPGQCLEW |
| | | | | MGVIRTSTSYTIYNQKFKGRVTMTRDTSTSTV |
| | | | | YMELSSLRSEDTAVYYCARSGPGYFDVWGQG |
| | | | | TMVTVSSGGGGQGGGGQGGGGQDIQLTQSPSF |
| | | | | LSASVGDRVTITCRASENIYSYLAWYQQKPGK |
| | | | | APKLLIYNAKTLAEGVPSRFSGSGSGTEFTLTIS |
| | | | | SLQPEDFATYYCQHNYGTPYTFGCGTKLEIKSG |
| | | | | GGGQEVQLVESGGGLVQPGGSLKLSCAASGFT |
| | | | | FNKYAMNWVRQAPGKGMEWVARIRSKYNNY |
| | | | | ATYYADAVKDRFTISRDDSKNTLYLQMNNLK |
| | | | | TEDTAVYYCVRAGNFGSSYISYFAYWGQGTLV |
| | | | | TVSSGGGGQGGGGQGGGGQQTVVTQEPSLTV |
| | | | | SPGGTVTITCGSSTGAVTSGNYPNWIQKKPGQ |
| | | | | APRGLIGGTKFLAPGTPARFSGSLEGGKAALTL |
| | | | | SGVQPEDEAEYYCVLYYSNRWVFGSGTKLTV |
| | | | | L |
| 290. | MS 15-B12 CC x | artificial | Aa | QVQLQESGPGLVKPSETLSLTCTVSGGSISSSSY |
| | I2L x (G4Q)3x | | | FWGWIRQPPGKCLEWIGNIYYSGSSNYNPSLKS |
| | scFcmod x | | | RVTISVDTSKNQFSLKLSSVTAADTAVYYCAR |
| | (G4Q3) x CH3 24- | | | LPRGDRDAFDIWGQGTMVTVSSGGGGQGGGG |
| | D7 CC x I2L - | | | QGGGGQDIVMTQSPSSLSASVGDRVTITCRASQ |
| | Full Sequence | | | GISNYLAWYQQKPGKVPKLLIYAASTLQSGVP |
| | | | | SRFSGSGSGTDFTLTISSLQPEDFATYYCQQSYS |
| | | | | TPFTFGCGTKVEIKSGGGGQEVQLVESGGGLV |
| | | | | QPGGSLKLSCAASGFTFNKYAMNWVRQAPGK |
| | | | | GMEWVARIRSKYNNYATYYADAVKDRFTISR |
| | | | | DDSKNTLYLQMNNLKTEDTAVYYCVRAGNFG |
| | | | | SSYISYFAYWGQGTLVTVSSGGGGQGGGGQG |
| | | | | GGGQQTVVTQEPSLTVSPGGTVTITCGSSTGAV |
| | | | | TSGNYPNWIQKKPGQAPRGLIGGTKFLAPGTP |
| | | | | ARFSGSLEGGKAALTLSGVQPEDEAEYYCVLY |
| | | | | YSNRWVFGSGTKLTVLGGGGQGGGGQGGGG |
| | | | | QCPPCPAPELLGGPSVFLFPPKPKDTLMISRTPE |
| | | | | VTCVVVDVSHEEPEVKFNWYVDGVEVHNAKT |
| | | | | KPCEEQYGSTYRCVSVLTVLHQDWLNGKEYK |
| | | | | CKVSNKALPAPIEKTISKAKGQPREPQVYTLPP |
| | | | | SREEMTKNQVSLTCLVKGFYPSDIAVEWESNG |
| | | | | QPENNYKTTPPVLDSDGSFFLYSKLTVDKSRW |
| | | | | QQGNVFSCSVMHEALHNHYTQKSLSLSPGKG |
| | | | | GGGQGGGGQGGGGQGGGGQGGGGQGGGGQ |
| | | | | CPPCPAPELLGGPSVFLFPPKPKDTLMISRTPEV |
| | | | | TCVVVDVSHEEPEVKFNWYVDGVEVHNAKTK |
| | | | | PCEEQYGSTYRCVSVLTVLHQDWLNGKEYKC |
| | | | | KVSNKALPAPIEKTISKAKGQPREPQVYTLPPS |
| | | | | REEMTKNQVSLTCLVKGFYPSDIAVEWESNGQ |
| | | | | PENNYKTTPPVLDSDGSFFLYSKLTVDKSRWQ |
| | | | | QGNVFSCSVMHEALHNHYTQKSLSLSPGKGG |
| | | | | GGQGGGGQGGGGQQVQLVQSGAEVKKPGAS |
| | | | | VKVSCKASGYTFTNYWMNWVRQAPGQCLEW |
| | | | | MGNIHSKAHGTNYNQKFQGRVTMTVDTSSST |
| | | | | AYMELSRLRSDDTAVYYCATRYFYVMDYWG |
| | | | | QGTLVTVSSGGGGQGGGGQGGGGQDIQMTQS |
| | | | | PSSLSASVGDRVTITCRASQDISNYLNWYQQKP |
| | | | | GKVPKLLIYYTSRLHSGVPSRFSGSGSGTDFTL |
| | | | | TISSLQPEDVATYYCVQYAQFPLTFGCGTKVEI |
| | | | | KSGGGGQEVQLVESGGGLVQPGGSLKLSCAAS |
| | | | | GFTFNKYAMNWVRQAPGKGMEWVARIRSKY |
| | | | | NNYATYYADAVKDRFTISRDDSKNTLYLQMN |
| | | | | NLKTEDTAVYYCVRAGNFGSSYISYFAYWGQ |
| | | | | GTLVTVSSGGGGQGGGGQGGGGQQTVVTQEP |
| | | | | SLTVSPGGTVTITCGSSTGAVTSGNYPNWIQKK |
| | | | | PGQAPRGLIGGTKFLAPGTPARFSGSLEGGKAA |
| | | | | LTLSGVQPEDEAEYYCVLYYSNRWVFGSGTKL |
| | | | | TVL |
| 291. | MS 15-B12 CC x | artificial | Aa | QVQLQESGPGLVKPSETLSLTCTVSGGSISSSSY |
| | I2L x G4 x scFc x | | | FWGWIRQPPGKCLEWIGNIYYSGSSNYNPSLKS |
| | G4 x CH3 15-E11 | | | RVTISVDTSKNQFSLKLSSVTAADTAVYYCAR |
| | CCx I2L - Full | | | LPRGDRDAFDIWGQGTMVTVSSGGGGSGGGG |
| | Sequence | | | SGGGGSDIVMTQSPSSLSASVGDRVTITCRASQ |
| | | | | GISNYLAWYQQKPGKVPKLLIYAASTLQSGVP |
| | | | | SRFSGSGSGTDFTLTISSLQPEDFATYYCQQSYS |
| | | | | TPFTFGCGTKVEIKSGGGGSEVQLVESGGGLV |
| | | | | QPGGSLKLSCAASGFTFNKYAMNWVRQAPGK |
| | | | | GMEWVARIRSKYNNYATYYADAVKDRFTISR |
| | | | | DDSKNTLYLQMNNLKTEDTAVYYCVRAGNFG |
| | | | | SSYISYFAYWGQGTLVTVSSGGGGSGGGGSGG |
| | | | | GGSQTVVTQEPSLTVSPGGTVTITCGSSTGAVT |
| | | | | SGNYPNWIQKKPGQAPRGLIGGTKFLAPGTPA |
| | | | | RFSGSLEGGKAALTLSGVQPEDEAEYYCVLYY |
| | | | | SNRWVFGSGTKLTVLGGGGDKTHTCPPCPAPE |
| | | | | LLGGPSVFLFPPKPKDTLMISRTPEVTCVVVDV |
| | | | | SHEDPEVKFNWYVDGVEVHNAKTKPCEEQYG |
| | | | | STYRCVSVLTVLHQDWLNGKEYKCKVSNKAL |
| | | | | PAPIEKTISKAKGQPREPQVYTLPPSREEMTKN |
| | | | | QVSLTCLVKGFYPSDIAVEWESNGQPENNYKT |
| | | | | TPPVLDSDGSFFLYSKLTVDKSRWQQGNVFSC |
| | | | | SVMHEALHNHYTQKSLSLSPGKGGGGSGGGG |
| | | | | SGGGGSGGGGSGGGGSGGGGSDKTHTCPPCPA |
| | | | | PELLGGPSVFLFPPKPKDTLMISRTPEVTCVVV |
| | | | | DVSHEDPEVKFNWYVDGVEVHNAKTKPCEEQ |
| | | | | YGSTYRCVSVLTVLHQDWLNGKEYKCKVSNK |
| | | | | ALPAPIEKTISKAKGQPREPQVYTLPPSREEMT |
| | | | | KNQVSLTCLVKGFYPSDIAVEWESNGQPENNY |
| | | | | KTTPPVLDSDGSFFLYSKLTVDKSRWQQGNVF |
| | | | | SCSVMHEALHNHYTQKSLSLSPGKGGGGQVQ |
| | | | | LVQSGAEVKKPGASVKVSCKASGYTFTNYWM |
| | | | | NWVRQAPGQCLEWMGNIAYGVKGTNYNQKF |
| | | | | QGRVTMTVDTSSSTAYMELSRLRSDDTAVYY |
| | | | | CATRYFYVMDYWGQGTLVTVSSGGGGSGGG |
| | | | | GSGGGGSDIQMTQSPSSLSASVGDRVTITCRAS |
| | | | | QDISNYLNWYQQKPGKVPKLLIYYTSRLHSGV |
| | | | | PSRFSGSGSGTDFTLTISSLQPEDVATYYCVQY |
| | | | | AQFPLTFGCGTKVEIKSGGGGSEVQLVESGGG |
| | | | | LVQPGGSLKLSCAASGFTFNKYAMNWVRQAP |
| | | | | GKGMEWVARIRSKYNNYATYYADAVKDRFTI |
| | | | | SRDDSKNTLYLQMNNLKTEDTAVYYCVRAGN |
| | | | | FGSSYISYFAYWGQGTLVTVSSGGGGSGGGGS |
| | | | | GGGGSQTVVTQEPSLTVSPGGTVTITCGSSTGA |
| | | | | VTSGNYPNWIQKKPGQAPRGLIGGTKFLAPGT |
| | | | | PARFSGSLEGGKAALTLSGVQPEDEAEYYCVL |
| | | | | YYSNRWVFGSGTKLTVL |
| 292. | MS 15-B12 CC x | artificial | Aa | QVQLQESGPGLVKPSETLSLTCTVSGGSISSSSY |
| | I2L x G4 x scFc x | | | FWGWIRQPPGKCLEWIGNIYYSGSSNYNPSLKS |
| | G4 x CH3 22-A12 | | | RVTISVDTSKNQFSLKLSSVTAADTAVYYCAR |
| | CC x I2L_GQ - | | | LPRGDRDAFDIWGQGTMVTVSSGGGGQGGGG |
| | Full Sequence | | | QGGGGQDIVMTQSPSSLSASVGDRVTITCRASQ |
| | | | | GISNYLAWYQQKPGKVPKLLIYAASTLQSGVP |
| | | | | SRFSGSGSGTDFTLTISSLQPEDFATYYCQQSYS |
| | | | | TPFTFGCGTKVEIKSGGGGQEVQLVESGGGLV |
| | | | | QPGGSLKLSCAASGFTFNKYAMNWVRQAPGK |
| | | | | GMEWVARIRSKYNNYATYYADAVKDRFTISR |
| | | | | DDSKNTLYLQMNNLKTEDTAVYYCVRAGNFG |
| | | | | SSYISYFAYWGQGTLVTVSSGGGGQGGGGQG |
| | | | | GGGQQTVVTQEPSLTVSPGGTVTITCGSSTGAV |
| | | | | TSGNYPNWIQKKPGQAPRGLIGGTKFLAPGTP |
| | | | | ARFSGSLEGGKAALTLSGVQPEDEAEYYCVLY |
| | | | | YSNRWVFGSGTKLTVLGGGGCPPCPAPELLGG |
| | | | | PSVFLFPPKPKDTLMISRTPEVTCVVVDVSHEE |
| | | | | PEVKFNWYVDGVEVHNAKTKPCEEQYGSTYR |
| | | | | CVSVLTVLHQDWLNGKEYKCKVSNKALPAPIE |
| | | | | KTISKAKGQPREPQVYTLPPSREEMTKNQVSLT |
| | | | | CLVKGFYPSDIAVEWESNGQPENNYKTTPPVL |
| | | | | DSDGSFFLYSKLTVDKSRWQQGNVFSCSVMHE |
| | | | | ALHNHYTQKSLSLSPGKGGGGQGGGGQGGGG |
| | | | | QGGGGQGGGGQGGGGQCPPCPAPELLGGPSV |
| | | | | FLFPPKPKDTLMISRTPEVTCVVVDVSHEEPEV |
| | | | | KFNWYVDGVEVHNAKTKPCEEQYGSTYRCVS |
| | | | | VLTVLHQDWLNGKEYKCKVSNKALPAPIEKTI |
| | | | | SKAKGQPREPQVYTLPPSREEMTKNQVSLTCL |
| | | | | VKGFYPSDIAVEWESNGQPENNYKTTPPVLDS |
| | | | | DGSFFLYSKLTVDKSRWQQGNVFSCSVMHEA |
| | | | | LHNHYTQKSLSLSPGKGGGGQVQLVQSGAEV |
| | | | | VKPGASVKVSCKASGYTFTSSWMNWVRQAPG |
| | | | | QCLEWMGRIYTGTGETKYSGKFQGRVTITRDT |
| | | | | SASTAYMELSSLTSEDTAVYYCARQRDYGALY |
| | | | | AMDYWGQGTLVTVSSGGGGQGGGGQGGGGQ |
| | | | | DIQLTQSPSFLSASVGDRVTITCRASDDIYSYLA |
| | | | | WYQQKPGKAPKLLVYNAKTLAEGVPSRFSGS |
| | | | | GSGTEFTLTISSLQPEDFATYYCQNHDRTPFTFG |
| | | | | CGTKVDIKSGGGGQEVQLVESGGGLVQPGGSL |
| | | | | KLSCAASGFTFNKYAMNWVRQAPGKGMEWV |
| | | | | ARIRSKYNNYATYYADAVKDRFTISRDDSKNT |
| | | | | LYLQMNNLKTEDTAVYYCVRAGNFGSSYISYF |
| | | | | AYWGQGTLVTVSSGGGGQGGGGQGGGGQQT |
| | | | | VVTQEPSLTVSPGGTVTITCGSSTGAVTSGNYP |
| | | | | NWIQKKPGQAPRGLIGGTKFLAPGTPARFSGSL |
| | | | | EGGKAALTLSGVQPEDEAEYYCVLYYSNRWV |
| | | | | FGSGTKLTVL |
| 293. | MS 15-B12 CC x | artificial | Aa | QVQLQESGPGLVKPSETLSLTCTVSGGSISSSSY |
| | I2L x G4 x scFc x | | | FWGWIRQPPGKCLEWIGNIYYSGSSNYNPSLKS |
| | G4 x CH3 24-D7 | | | RVTISVDTSKNQFSLKLSSVTAADTAVYYCAR |
| | CC x I2L_GQ - | | | LPRGDRDAFDIWGQGTMVTVSSGGGGQGGGG |
| | Full Sequence | | | QGGGGQDIVMTQSPSSLSASVGDRVTITCRASQ |
| | | | | GISNYLAWYQQKPGKVPKLLIYAASTLQSGVP |
| | | | | SRFSGSGSGTDFTLTISSLQPEDFATYYCQQSYS |
| | | | | TPFTFGCGTKVEIKSGGGGQEVQLVESGGGLV |
| | | | | QPGGSLKLSCAASGFTFNKYAMNWVRQAPGK |
| | | | | GMEWVARIRSKYNNYATYYADAVKDRFTISR |
| | | | | DDSKNTLYLQMNNLKTEDTAVYYCVRAGNFG |
| | | | | SSYISYFAYWGQGTLVTVSSGGGGQGGGGQG |
| | | | | GGGQQTVVTQEPSLTVSPGGTVTITCGSSTGAV |
| | | | | TSGNYPNWIQKKPGQAPRGLIGGTKFLAPGTP |
| | | | | ARFSGSLEGGKAALTLSGVQPEDEAEYYCVLY |
| | | | | YSNRWVFGSGTKLTVLGGGGCPPCPAPELLGG |
| | | | | PSVFLFPPKPKDTLMISRTPEVTCVVVDVSHEE |
| | | | | PEVKFNWYVDGVEVHNAKTKPCEEQYGSTYR |
| | | | | CVSVLTVLHQDWLNGKEYKCKVSNKALPAPIE |
| | | | | KTISKAKGQPREPQVYTLPPSREEMTKNQVSLT |
| | | | | CLVKGFYPSDIAVEWESNGQPENNYKTTPPVL |
| | | | | DSDGSFFLYSKLTVDKSRWQQGNVFSCSVMHE |
| | | | | ALHNHYTQKSLSLSPGKGGGGQGGGGQGGGG |
| | | | | QGGGGQGGGGQGGGGQCPPCPAPELLGGPSV |
| | | | | FLFPPKPKDTLMISRTPEVTCVVVDVSHEEPEV |
| | | | | KFNWYVDGVEVHNAKTKPCEEQYGSTYRCVS |
| | | | | VLTVLHQDWLNGKEYKCKVSNKALPAPIEKTI |
| | | | | SKAKGQPREPQVYTLPPSREEMTKNQVSLTCL |
| | | | | VKGFYPSDIAVEWESNGQPENNYKTTPPVLDS |
| | | | | DGSFFLYSKLTVDKSRWQQGNVFSCSVMHEA |
| | | | | LHNHYTQKSLSLSPGKGGGGQVQLVQSGAEV |
| | | | | KKPGASVKVSCKASGYTFTNYWMNWVRQAP |
| | | | | GQCLEWMGNIHSKAHGTNYNQKFQGRVTMT |
| | | | | VDTSSSTAYMELSRLRSDDTAVYYCATRYFYV |
| | | | | MDYWGQGTLVTVSSGGGGQGGGGQGGGGQD |
| | | | | IQMTQSPSSLSASVGDRVTITCRASQDISNYLN |
| | | | | WYQQKPGKVPKLLIYYTSRLHSGVPSRFSGSGS |
| | | | | GTDFTLTISSLQPEDVATYYCVQYAQFPLTFGC |
| | | | | GTKVEIKSGGGGQEVQLVESGGGLVQPGGSLK |
| | | | | LSCAASGFTFNKYAMNWVRQAPGKGMEWVA |
| | | | | RIRSKYNNYATYYADAVKDRFTISRDDSKNTL |
| | | | | YLQMNNLKTEDTAVYYCVRAGNFGSSYISYFA |
| | | | | YWGQGTLVTVSSGGGGQGGGGQGGGGQQTV |
| | | | | VTQEPSLTVSPGGTVTITCGSSTGAVTSGNYPN |
| | | | | WIQKKPGQAPRGLIGGTKFLAPGTPARFSGSLE |
| | | | | GGKAALTLSGVQPEDEAEYYCVLYYSNRWVF |
| | | | | GSGTKLTVL |
| 294. | MS 15-B12 CC x | artificial | Aa | QVQLQESGPGLVKPSETLSLTCTVSGGSISSSSY |
| | I2L x G4S3 x scFc | | | FWGWIRQPPGKCLEWIGNIYYSGSSNYNPSLKS |
| | x G4S3 x CH3 | | | RVTISVDTSKNQFSLKLSSVTAADTAVYYCAR |
| | 005-D5 CC x I2L - | | | LPRGDRDAFDIWGQGTMVTVSSGGGGSGGGG |
| | Full Sequence | | | SGGGGSDIVMTQSPSSLSASVGDRVTITCRASQ |
| | | | | GISNYLAWYQQKPGKVPKLLIYAASTLQSGVP |
| | | | | SRFSGSGSGTDFTLTISSLQPEDFATYYCQQSYS |
| | | | | TPFTFGCGTKVEIKSGGGGSEVQLVESGGGLV |
| | | | | QPGGSLKLSCAASGFTFNKYAMNWVRQAPGK |
| | | | | GMEWVARIRSKYNNYATYYADAVKDRFTISR |
| | | | | DDSKNTLYLQMNNLKTEDTAVYYCVRAGNFG |
| | | | | SSYISYFAYWGQGTLVTVSSGGGGSGGGGSGG |
| | | | | GGSQTVVTQEPSLTVSPGGTVTITCGSSTGAVT |
| | | | | SGNYPNWIQKKPGQAPRGLIGGTKFLAPGTPA |
| | | | | RFSGSLEGGKAALTLSGVQPEDEAEYYCVLYY |
| | | | | SNRWVFGSGTKLTVLGGGGSGGGGSGGGGSD |
| | | | | KTHTCPPCPAPELLGGPSVFLFPPKPKDTLMISR |
| | | | | TPEVTCVVVDVSHEDPEVKFNWYVDGVEVHN |
| | | | | AKTKPCEEQYGSTYRCVSVLTVLHQDWLNGK |
| | | | | EYKCKVSNKALPAPIEKTISKAKGQPREPQVYT |
| | | | | LPPSREEMTKNQVSLTCLVKGFYPSDIAVEWES |
| | | | | NGQPENNYKTTPPVLDSDGSFFLYSKLTVDKS |
| | | | | RWQQGNVFSCSVMHEALHNHYTQKSLSLSPG |
| | | | | KGGGGSGGGGSGGGGSGGGGSGGGGSGGGGS |
| | | | | DKTHTCPPCPAPELLGGPSVFLFPPKPKDTLMIS |
| | | | | RTPEVTCVVVDVSHEDPEVKFNWYVDGVEVH |
| | | | | NAKTKPCEEQYGSTYRCVSVLTVLHQDWLNG |
| | | | | KEYKCKVSNKALPAPIEKTISKAKGQPREPQVY |
| | | | | TLPPSREEMTKNQVSLTCLVKGFYPSDIAVEWE |
| | | | | SNGQPENNYKTTPPVLDSDGSFFLYSKLTVDKS |
| | | | | RWQQGNVFSCSVMHEALHNHYTQKSLSLSPG |
| | | | | KGGGGSGGGGSGGGGSEVQLLESGGGLVQPG |
| | | | | GSLRLSCAASGFSFSSYPINWVRQAPGKCLEW |
| | | | | VGVIWTGGGTNYASSVKGRFTISRDNSKNTVY |
| | | | | LQMNSLRAEDTAVYYCAKSRGVYDFKGRGA |
| | | | | MDYWGQGTLVTVSSGGGGSGGGGSGGGGSDI |
| | | | | VMTQSPDSLAVSLGERATINCKSSQSLLYSSNQ |
| | | | | KNYFAWYQQKPGQPPKLLIYWASTRESGVPDR |
| | | | | FSGSGSGTDFTLTISSLQAEDVAVYYCQQYYSY |
| | | | | PYTFGCGTKLEIKSGGGGSEVQLVESGGGLVQ |
| | | | | PGGSLKLSCAASGFTFNKYAMNWVRQAPGKG |
| | | | | MEWVARIRSKYNNYATYYADAVKDRFTISRD |
| | | | | DSKNTLYLQMNNLKTEDTAVYYCVRAGNFGS |
| | | | | SYISYFAYWGQGTLVTVSSGGGGSGGGGSGGG |
| | | | | GSQTVVTQEPSLTVSPGGTVTITCGSSTGAVTS |
| | | | | GNYPNWIQKKPGQAPRGLIGGTKFLAPGTPAR |
| | | | | FSGSLEGGKAALTLSGVQPEDEAEYYCVLYYS |
| | | | | NRWVFGSGTKLTVL |
| 295. | MS 15-B12 CC x | artificial | Aa | QVQLQESGPGLVKPSETLSLTCTVSGGSISSSSY |
| | I2M2 x G4 x scFc | | | FWGWIRQPPGKCLEWIGNIYYSGSSNYNPSLKS |
| | xG4 x CH3 24-D7 | | | RVTISVDTSKNQFSLKLSSVTAADTAVYYCAR |
| | CC x I2M2_GQ - | | | LPRGDRDAFDIWGQGTMVTVSSGGGGQGGGG |
| | Full Sequence | | | QGGGGQDIVMTQSPSSLSASVGDRVTITCRASQ |
| | | | | GISNYLAWYQQKPGKVPKLLIYAASTLQSGVP |
| | | | | SRFSGSGSGTDFTLTISSLQPEDFATYYCQQSYS |
| | | | | TPFTFGCGTKVEIKSGGGGQEVQLVESGGGLV |
| | | | | QPGGSLKLSCAASGFTFNKYAINWVREAPGKG |
| | | | | LEWVARIRSKYNNYATYYADAVKDRFTISRDD |
| | | | | SKNTAYLQMNNLKTEDTAVYYCVRNANFGTS |
| | | | | YISYFAYWGQGTLVTVSSGGGGQGGGGQGGG |
| | | | | GQQTVVTQEPSLTVSPGGTVTLTCGSSTGAVTS |
| | | | | GNYPNWVQKKPGQAPRGLIGGTKFLAPGTPAR |
| | | | | FSGSLLGGKAALTLSGVQPEDEAEYYCVLWYS |
| | | | | NRWVFGSGTKLTVLGGGGCPPCPAPELLGGPS |
| | | | | VFLFPPKPKDTLMISRTPEVTCVVVDVSHEEPE |
| | | | | VKFNWYVDGVEVHNAKTKPCEEQYGSTYRCV |
| | | | | SVLTVLHQDWLNGKEYKCKVSNKALPAPIEKT |
| | | | | ISKAKGQPREPQVYTLPPSREEMTKNQVSLTCL |
| | | | | VKGFYPSDIAVEWESNGQPENNYKTTPPVLDS |
| | | | | DGSFFLYSKLTVDKSRWQQGNVFSCSVMHEA |
| | | | | LHNHYTQKSLSLSPGKGGGGQGGGGQGGGGQ |
| | | | | GGGGQGGGGQGGGGQCPPCPAPELLGGPSVFL |
| | | | | FPPKPKDTLMISRTPEVTCVVVDVSHEEPEVKF |
| | | | | NWYVDGVEVHNAKTKPCEEQYGSTYRCVSVL |
| | | | | TVLHQDWLNGKEYKCKVSNKALPAPIEKTISK |
| | | | | AKGQPREPQVYTLPPSREEMTKNQVSLTCLVK |
| | | | | GFYPSDIAVEWESNGQPENNYKTTPPVLDSDG |
| | | | | SFFLYSKLTVDKSRWQQGNVFSCSVMHEALH |
| | | | | NHYTQKSLSLSPGKGGGGQVQLVQSGAEVKK |
| | | | | PGASVKVSCKASGYTFTNYWMNWVRQAPGQ |
| | | | | CLEWMGNIHSKAHGTNYNQKFQGRVTMTVDT |
| | | | | SSSTAYMELSRLRSDDTAVYYCATRYFYVMD |
| | | | | YWGQGTLVTVSSGGGGQGGGGQGGGGQDIQ |
| | | | | MTQSPSSLSASVGDRVTITCRASQDISNYLNWY |
| | | | | QQKPGKVPKLLIYYTSRLHSGVPSRFSGSGSGT |
| | | | | DFTLTISSLQPEDVATYYCVQYAQFPLTFGCGT |
| | | | | KVEIKSGGGGQEVQLVESGGGLVQPGGSLKLS |
| | | | | CAASGFTFNKYAINWVREAPGKGLEWVARIRS |
| | | | | KYNNYATYYADAVKDRFTISRDDSKNTAYLQ |
| | | | | MNNLKTEDTAVYYCVRNANFGTSYISYFAYW |
| | | | | GQGTLVTVSSGGGGQGGGGQGGGGQQTVVT |
| | | | | QEPSLTVSPGGTVTLTCGSSTGAVTSGNYPNW |
| | | | | VQKKPGQAPRGLIGGTKFLAPGTPARFSGSLLG |
| | | | | GKAALTLSGVQPEDEAEYYCVLWYSNRWVFG |
| | | | | SGTKLTVL |
| 296. | MS 15-B12 CC x | artificial | aa | QVQLQESGPGLVKPSETLSLTCTVSGGSISSSSY |
| | I2M2 x (G4Q)3x | | | FWGWIRQPPGKCLEWIGNIYYSGSSNYNPSLKS |
| | scFcmod x | | | RVTISVDTSKNQFSLKLSSVTAADTAVYYCAR |
| | (G4Q)3 x CH3 | | | LPRGDRDAFDIWGQGTMVTVSSGGGGQGGGG |
| | 005-D5 CC x | | | QGGGGQDIVMTQSPSSLSASVGDRVTITCRASQ |
| | I2M2_GQ - Full | | | GISNYLAWYQQKPGKVPKLLIYAASTLQSGVP |
| | Sequence | | | SRFSGSGSGTDFTLTISSLQPEDFATYYCQQSYS |
| | | | | TPFTFGCGTKVEIKSGGGGQEVQLVESGGGLV |
| | | | | QPGGSLKLSCAASGFTFNKYAINWVREAPGKG |
| | | | | LEWVARIRSKYNNYATYYADAVKDRFTISRDD |
| | | | | SKNTAYLQMNNLKTEDTAVYYCVRNANFGTS |
| | | | | YISYFAYWGQGTLVTVSSGGGGQGGGGQGGG |
| | | | | GQQTVVTQEPSLTVSPGGTVTLTCGSSTGAVTS |
| | | | | GNYPNWVQKKPGQAPRGLIGGTKFLAPGTPAR |
| | | | | FSGSLLGGKAALTLSGVQPEDEAEYYCVLWYS |
| | | | | NRWVFGSGTKLTVLGGGGQGGGGQGGGGQC |
| | | | | PPCPAPELLGGPSVFLFPPKPKDTLMISRTPEVT |
| | | | | CVVVDVSHEEPEVKFNWYVDGVEVHNAKTKP |
| | | | | CEEQYGSTYRCVSVLTVLHQDWLNGKEYKCK |
| | | | | VSNKALPAPIEKTISKAKGQPREPQVYTLPPSRE |
| | | | | EMTKNQVSLTCLVKGFYPSDIAVEWESNGQPE |
| | | | | NNYKTTPPVLDSDGSFFLYSKLTVDKSRWQQG |
| | | | | NVFSCSVMHEALHNHYTQKSLSLSPGKGGGG |
| | | | | QGGGGQGGGGQGGGGQGGGGQGGGGQCPPC |
| | | | | PAPELLGGPSVFLFPPKPKDTLMISRTPEVTCVV |
| | | | | VDVSHEEPEVKFNWYVDGVEVHNAKTKPCEE |
| | | | | QYGSTYRCVSVLTVLHQDWLNGKEYKCKVSN |
| | | | | KALPAPIEKTISKAKGQPREPQVYTLPPSREEM |
| | | | | TKNQVSLTCLVKGFYPSDIAVEWESNGQPENN |
| | | | | YKTTPPVLDSDGSFFLYSKLTVDKSRWQQGNV |
| | | | | FSCSVMHEALHNHYTQKSLSLSPGKGGGGQG |
| | | | | GGGQGGGGQEVQLLESGGGLVQPGGSLRLSC |
| | | | | AASGFSFSSYPINWVRQAPGKCLEWVGVIWTG |
| | | | | GGTNYASSVKGRFTISRDNSKNTVYLQMNSLR |
| | | | | AEDTAVYYCAKSRGVYDFKGRGAMDYWGQG |
| | | | | TLVTVSSGGGGQGGGGQGGGGQDIVMTQSPD |
| | | | | SLAVSLGERATINCKSSQSLLYSSNQKNYFAW |
| | | | | YQQKPGQPPKLLIYWASTRESGVPDRFSGSGSG |
| | | | | TDFTLTISSLQAEDVAVYYCQQYYSYPYTFGC |
| | | | | GTKLEIKSGGGGQEVQLVESGGGLVQPGGSLK |
| | | | | LSCAASGFTFNKYAINWVREAPGKGLEWVARI |
| | | | | RSKYNNYATYYADAVKDRFTISRDDSKNTAYL |
| | | | | QMNNLKTEDTAVYYCVRNANFGTSYISYFAY |
| | | | | WGQGTLVTVSSGGGGQGGGGQGGGGQQTVV |
| | | | | TQEPSLTVSPGGTVTLTCGSSTGAVTSGNYPN |
| | | | | WVQKKPGQAPRGLIGGTKFLAPGTPARFSGSL |
| | | | | LGGKAALTLSGVQPEDEAEYYCVLWYSNRWV |
| | | | | FGSGTKLTVL |
| 297. | MS 15-B12 CC x | artificial | aa | QVQLQESGPGLVKPSETLSLTCTVSGGSISSSSY |
| | I2M2 x (G4Q)3x | | | FWGWIRQPPGKCLEWIGNIYYSGSSNYNPSLKS |
| | scFcmod x | | | RVTISVDTSKNQFSLKLSSVTAADTAVYYCAR |
| | (G4Q)3 x CH3 26- | | | LPRGDRDAFDIWGQGTMVTVSSGGGGQGGGG |
| | E5 CCx | | | QGGGGQDIVMTQSPSSLSASVGDRVTITCRASQ |
| | I2M2_GQ - Full | | | GISNYLAWYQQKPGKVPKLLIYAASTLQSGVP |
| | Sequence | | | SRFSGSGSGTDFTLTISSLQPEDFATYYCQQSYS |
| | | | | TPFTFGCGTKVEIKSGGGGQEVQLVESGGGLV |
| | | | | QPGGSLKLSCAASGFTFNKYAINWVREAPGKG |
| | | | | LEWVARIRSKYNNYATYYADAVKDRFTISRDD |
| | | | | SKNTAYLQMNNLKTEDTAVYYCVRNANFGTS |
| | | | | YISYFAYWGQGTLVTVSSGGGGQGGGGQGGG |
| | | | | GQQTVVTQEPSLTVSPGGTVTLTCGSSTGAVTS |
| | | | | GNYPNWVQKKPGQAPRGLIGGTKFLAPGTPAR |
| | | | | FSGSLLGGKAALTLSGVQPEDEAEYYCVLWYS |
| | | | | NRWVFGSGTKLTVLGGGGQGGGGQGGGGQC |
| | | | | PPCPAPELLGGPSVFLFPPKPKDTLMISRTPEVT |
| | | | | CVVVDVSHEEPEVKFNWYVDGVEVHNAKTKP |
| | | | | CEEQYGSTYRCVSVLTVLHQDWLNGKEYKCK |
| | | | | VSNKALPAPIEKTISKAKGQPREPQVYTLPPSRE |
| | | | | EMTKNQVSLTCLVKGFYPSDIAVEWESNGQPE |
| | | | | NNYKTTPPVLDSDGSFFLYSKLTVDKSRWQQG |
| | | | | NVFSCSVMHEALHNHYTQKSLSLSPGKGGGG |
| | | | | QGGGGQGGGGQGGGGQGGGGQGGGGQCPPC |
| | | | | PAPELLGGPSVFLFPPKPKDTLMISRTPEVTCVV |
| | | | | VDVSHEEPEVKFNWYVDGVEVHNAKTKPCEE |
| | | | | QYGSTYRCVSVLTVLHQDWLNGKEYKCKVSN |
| | | | | KALPAPIEKTISKAKGQPREPQVYTLPPSREEM |
| | | | | TKNQVSLTCLVKGFYPSDIAVEWESNGQPENN |
| | | | | YKTTPPVLDSDGSFFLYSKLTVDKSRWQQGNV |
| | | | | FSCSVMHEALHNHYTQKSLSLSPGKGGGGQG |
| | | | | GGGQGGGGQQVQLVQSGAEVKKPGASVKVSC |
| | | | | KASGYTFTSYWMHWVRQAPGQCLEWMGVIR |
| | | | | TSTSYTIYNQKFKGRVTMTRDTSTSTVYMELSS |
| | | | | LRSEDTAVYYCARSGPGYFDVWGQGTMVTVS |
| | | | | SGGGGQGGGGQGGGGQDIQLTQSPSFLSASVG |
| | | | | DRVTITCRASENIYSYLAWYQQKPGKAPKLLIY |
| | | | | NAKTLAEGVPSRFSGSGSGTEFTLTISSLQPEDF |
| | | | | ATYYCQHNYGTPYTFGCGTKLEIKSGGGGQEV |
| | | | | QLVESGGGLVQPGGSLKLSCAASGFTFNKYAI |
| | | | | NWVREAPGKGLEWVARIRSKYNNYATYYAD |
| | | | | AVKDRFTISRDDSKNTAYLQMNNLKTEDTAV |
| | | | | YYCVRNANFGTSYISYFAYWGQGTLVTVSSGG |
| | | | | GGQGGGGQGGGGQQTVVTQEPSLTVSPGGTV |
| | | | | TLTCGSSTGAVTSGNYPNWVQKKPGQAPRGLI |
| | | | | GGTKFLAPGTPARFSGSLLGGKAALTLSGVQPE |
| | | | | DEAEYYCVLWYSNRWVFGSGTKLTVL |
| 298. | MS 15-B12 CCx | artificial | aa | QVQLQESGPGLVKPSETLSLTCTVSGGSISSSSY |
| | 6H10.09x (G4)x | | | FWGWIRQPPGKCLEWIGNIYYSGSSNYNPSLKS |
| | scFcx (G4)x CH3 | | | RVTISVDTSKNQFSLKLSSVTAADTAVYYCAR |
| | 14-D1 CCx | | | LPRGDRDAFDIWGQGTMVTVSSGGGGSGGGG |
| | 6H10.09 - Full | | | SGGGGSDIVMTQSPSSLSASVGDRVTITCRASQ |
| | Sequence | | | GISNYLAWYQQKPGKVPKLLIYAASTLQSGVP |
| | | | | SRFSGSGSGTDFTLTISSLQPEDFATYYCQQSYS |
| | | | | TPFTFGCGTKVEIKSGGGGSEVQLVESGGGLV |
| | | | | QPGGSLKLSCAASGFTFNKYAMNWVRQAPGK |
| | | | | GMEWVARIRSKYNNYATYYADAVKDRFTISR |
| | | | | DDSKNTLYLQMNNLKTEDTAVYYCVRAGNFG |
| | | | | SSYISYFAYWGQGTLVTVSSGGGGSGGGGSGG |
| | | | | GGSQTVVTQEPSLTVSPGGTVTITCGSSTGAVT |
| | | | | SGNYPNWIQKKPGQAPRGLIGGTKFLAPGTPA |
| | | | | RFSGSLEGGKAALTLSGVQPEDEAEYYCVLYY |
| | | | | SNRWVFGSGTKLTVLGGGGDKTHTCPPCPAPE |
| | | | | LLGGPSVFLFPPKPKDTLMISRTPEVTCVVVDV |
| | | | | SHEDPEVKFNWYVDGVEVHNAKTKPCEEQYG |
| | | | | STYRCVSVLTVLHQDWLNGKEYKCKVSNKAL |
| | | | | PAPIEKTISKAKGQPREPQVYTLPPSREEMTKN |
| | | | | QVSLTCLVKGFYPSDIAVEWESNGQPENNYKT |
| | | | | TPPVLDSDGSFFLYSKLTVDKSRWQQGNVFSC |
| | | | | SVMHEALHNHYTQKSLSLSPGKGGGGSGGGG |
| | | | | SGGGGSGGGGSGGGGSGGGGSDKTHTCPPCPA |
| | | | | PELLGGPSVFLFPPKPKDTLMISRTPEVTCVVV |
| | | | | DVSHEDPEVKFNWYVDGVEVHNAKTKPCEEQ |
| | | | | YGSTYRCVSVLTVLHQDWLNGKEYKCKVSNK |
| | | | | ALPAPIEKTISKAKGQPREPQVYTLPPSREEMT |
| | | | | KNQVSLTCLVKGFYPSDIAVEWESNGQPENNY |
| | | | | KTTPPVLDSDGSFFLYSKLTVDKSRWQQGNVF |
| | | | | SCSVMHEALHNHYTQKSLSLSPGKGGGGQVQ |
| | | | | LVQSGAEVKKPGASVKVSCKASGYTFTSYWM |
| | | | | HWVRQAPGQCLEWMGVIYTSGSYTIYNQKFQ |
| | | | | GRVTMTRDTSTSTAYMELSSLRSEDTAVYYCA |
| | | | | RSGPGYFDVWGQGTMVTVSSGGGGSGGGGSG |
| | | | | GGGSDIQLTQSPSFLSASVGDRVTITCRASGNIH |
| | | | | NYLAWYQQKPGKAPKLLIYNAKTLAEGVPSRF |
| | | | | SGSGSGTEFTLKISSLQPEDFATYYCQHFAWTP |
| | | | | YTFGCGTKLEIKSGGGGSEVQLVESGGGLVQP |
| | | | | GGSLKLSCAASGFTFNKYAMNWVRQAPGKG |
| | | | | MEWVARIRSKYNNYATYYADAVKDRFTISRD |
| | | | | DSKNTLYLQMNNLKTEDTAVYYCVRAGNFGS |
| | | | | SYISYFAYWGQGTLVTVSSGGGGSGGGGSGGG |
| | | | | GSQTVVTQEPSLTVSPGGTVTITCGSSTGAVTS |
| | | | | GNYPNWIQKKPGQAPRGLIGGTKFLAPGTPAR |
| | | | | FSGSLEGGKAALTLSGVQPEDEAEYYCVLYYS |
| | | | | NRWVFGSGTKLTVL |
| 299. | MS 15-B12 CCx | artificial | aa | QVQLQESGPGLVKPSETLSLTCTVSGGSISSSSY |
| | 6H10.09x | | | FWGWIRQPPGKCLEWIGNIYYSGSSNYNPSLKS |
| | (G4S)3x scFcx | | | RVTISVDTSKNQFSLKLSSVTAADTAVYYCAR |
| | (G4S)3x CH3 14- | | | LPRGDRDAFDIWGQGTMVTVSSGGGGSGGGG |
| | D1 CCx 6H10.09 - | | | SGGGGSDIVMTQSPSSLSASVGDRVTITCRASQ |
| | Full Sequence | | | GISNYLAWYQQKPGKVPKLLIYAASTLQSGVP |
| | | | | SRFSGSGSGTDFTLTISSLQPEDFATYYCQQSYS |
| | | | | TPFTFGCGTKVEIKSGGGGSEVQLVESGGGLV |
| | | | | QPGGSLKLSCAASGFTFNKYAMNWVRQAPGK |
| | | | | GMEWVARIRSKYNNYATYYADAVKDRFTISR |
| | | | | DDSKNTLYLQMNNLKTEDTAVYYCVRAGNFG |
| | | | | SSYISYFAYWGQGTLVTVSSGGGGSGGGGSGG |
| | | | | GGSQTVVTQEPSLTVSPGGTVTITCGSSTGAVT |
| | | | | SGNYPNWIQKKPGQAPRGLIGGTKFLAPGTPA |
| | | | | RFSGSLEGGKAALTLSGVQPEDEAEYYCVLYY |
| | | | | SNRWVFGSGTKLTVLGGGGSGGGGSGGGGSD |
| | | | | KTHTCPPCPAPELLGGPSVFLFPPKPKDTLMISR |
| | | | | TPEVTCVVVDVSHEDPEVKFNWYVDGVEVHN |
| | | | | AKTKPCEEQYGSTYRCVSVLTVLHQDWLNGK |
| | | | | EYKCKVSNKALPAPIEKTISKAKGQPREPQVYT |
| | | | | LPPSREEMTKNQVSLTCLVKGFYPSDIAVEWES |
| | | | | NGQPENNYKTTPPVLDSDGSFFLYSKLTVDKS |
| | | | | RWQQGNVFSCSVMHEALHNHYTQKSLSLSPG |
| | | | | KGGGGSGGGGSGGGGSGGGGSGGGGSGGGGS |
| | | | | DKTHTCPPCPAPELLGGPSVFLFPPKPKDTLMIS |
| | | | | RTPEVTCVVVDVSHEDPEVKFNWYVDGVEVH |
| | | | | NAKTKPCEEQYGSTYRCVSVLTVLHQDWLNG |
| | | | | KEYKCKVSNKALPAPIEKTISKAKGQPREPQVY |
| | | | | TLPPSREEMTKNQVSLTCLVKGFYPSDIAVEWE |
| | | | | SNGQPENNYKTTPPVLDSDGSFFLYSKLTVDKS |
| | | | | RWQQGNVFSCSVMHEALHNHYTQKSLSLSPG |
| | | | | KGGGGSGGGGSGGGGSQVQLVQSGAEVKKPG |
| | | | | ASVKVSCKASGYTFTSYWMHWVRQAPGQCLE |
| | | | | WMGVIYTSGSYTIYNQKFQGRVTMTRDTSTST |
| | | | | AYMELSSLRSEDTAVYYCARSGPGYFDVWGQ |
| | | | | GTMVTVSSGGGGSGGGGSGGGGSDIQLTQSPS |
| | | | | FLSASVGDRVTITCRASGNIHNYLAWYQQKPG |
| | | | | KAPKLLIYNAKTLAEGVPSRFSGSGSGTEFTLKI |
| | | | | SSLQPEDFATYYCQHFAWTPYTFGCGTKLEIKS |
| | | | | GGGGSEVQLVESGGGLVQPGGSLKLSCAASGF |
| | | | | TFNKYAMNWVRQAPGKGMEWVARIRSKYNN |
| | | | | YATYYADAVKDRFTISRDDSKNTLYLQMNNL |
| | | | | KTEDTAVYYCVRAGNFGSSYISYFAYWGQGTL |
| | | | | VTVSSGGGGSGGGGSGGGGSQTVVTQEPSLTV |
| | | | | SPGGTVTITCGSSTGAVTSGNYPNWIQKKPGQ |
| | | | | APRGLIGGTKFLAPGTPARFSGSLEGGKAALTL |
| | | | | SGVQPEDEAEYYCVLYYSNRWVFGSGTKLTV |
| | | | | L |
| 300. | MS 15-B12 CCx | artificial | aa | QVQLQESGPGLVKPSETLSLTCTVSGGSISSSSY |
| | I2M2 x G4 x scFc | | | FWGWIRQPPGKCLEWIGNIYYSGSSNYNPSLKS |
| | x G4 x CH3 15- | | | RVTISVDTSKNQFSLKLSSVTAADTAVYYCAR |
| | E11 CC x I2M2_ | | | LPRGDRDAFDIWGQGTMVTVSSGGGGQGGGG |
| | GQ - Full | | | QGGGGQDIVMTQSPSSLSASVGDRVTITCRASQ |
| | Sequence | | | GISNYLAWYQQKPGKVPKLLIYAASTLQSGVP |
| | | | | SRFSGSGSGTDFTLTISSLQPEDFATYYCQQSYS |
| | | | | TPFTFGCGTKVEIKSGGGGQEVQLVESGGGLV |
| | | | | QPGGSLKLSCAASGFTFNKYAINWVREAPGKG |
| | | | | LEWVARIRSKYNNYATYYADAVKDRFTISRDD |
| | | | | SKNTAYLQMNNLKTEDTAVYYCVRNANFGTS |
| | | | | YISYFAYWGQGTLVTVSSGGGGQGGGGQGGG |
| | | | | GQQTVVTQEPSLTVSPGGTVTLTCGSSTGAVTS |
| | | | | GNYPNWVQKKPGQAPRGLIGGTKFLAPGTPAR |
| | | | | FSGSLLGGKAALTLSGVQPEDEAEYYCVLWYS |
| | | | | NRWVFGSGTKLTVLGGGGCPPCPAPELLGGPS |
| | | | | VFLFPPKPKDTLMISRTPEVTCVVVDVSHEEPE |
| | | | | VKFNWYVDGVEVHNAKTKPCEEQYGSTYRCV |
| | | | | SVLTVLHQDWLNGKEYKCKVSNKALPAPIEKT |
| | | | | ISKAKGQPREPQVYTLPPSREEMTKNQVSLTCL |
| | | | | VKGFYPSDIAVEWESNGQPENNYKTTPPVLDS |
| | | | | DGSFFLYSKLTVDKSRWQQGNVFSCSVMHEA |
| | | | | LHNHYTQKSLSLSPGKGGGGQGGGGQGGGGQ |
| | | | | GGGGQGGGGQGGGGQCPPCPAPELLGGPSVFL |
| | | | | FPPKPKDTLMISRTPEVTCVVVDVSHEEPEVKF |
| | | | | NWYVDGVEVHNAKTKPCEEQYGSTYRCVSVL |
| | | | | TVLHQDWLNGKEYKCKVSNKALPAPIEKTISK |
| | | | | AKGQPREPQVYTLPPSREEMTKNQVSLTCLVK |
| | | | | GFYPSDIAVEWESNGQPENNYKTTPPVLDSDG |
| | | | | SFFLYSKLTVDKSRWQQGNVFSCSVMHEALH |
| | | | | NHYTQKSLSLSPGKGGGGQVQLVQSGAEVKK |
| | | | | PGASVKVSCKASGYTFTNYWMNWVRQAPGQ |
| | | | | CLEWMGNIAYGVKGTNYNQKFQGRVTMTVD |
| | | | | TSSSTAYMELSRLRSDDTAVYYCATRYFYVMD |
| | | | | YWGQGTLVTVSSGGGGQGGGGQGGGGQDIQ |
| | | | | MTQSPSSLSASVGDRVTITCRASQDISNYLNWY |
| | | | | QQKPGKVPKLLIYYTSRLHSGVPSRFSGSGSGT |
| | | | | DFTLTISSLQPEDVATYYCVQYAQFPLTFGCGT |
| | | | | KVEIKSGGGGQEVQLVESGGGLVQPGGSLKLS |
| | | | | CAASGFTFNKYAINWVREAPGKGLEWVARIRS |
| | | | | KYNNYATYYADAVKDRFTISRDDSKNTAYLQ |
| | | | | MNNLKTEDTAVYYCVRNANFGTSYISYFAYW |
| | | | | GQGTLVTVSSGGGGQGGGGQGGGGQQTVVT |
| | | | | QEPSLTVSPGGTVTLTCGSSTGAVTSGNYPNW |
| | | | | VQKKPGQAPRGLIGGTKFLAPGTPARFSGSLLG |
| | | | | GKAALTLSGVQPEDEAEYYCVLWYSNRWVFG |
| | | | | SGTKLTVL |
| 301. | MS 15-B12 CC x | artificial | aa | QVQLQESGPGLVKPSETLSLTCTVSGGSISSSSY |
| | I2L x G4S3 x scFc | | | FWGWIRQPPGKCLEWIGNIYYSGSSNYNPSLKS |
| | x G4S3 x CH3 | | | RVTISVDTSKNQFSLKLSSVTAADTAVYYCAR |
| | 15-E11 CC x I2 - | | | LPRGDRDAFDIWGQGTMVTVSSGGGGSGGGG |
| | Full Sequence | | | SGGGGSDIVMTQSPSSLSASVGDRVTITCRASQ |
| | | | | GISNYLAWYQQKPGKVPKLLIYAASTLQSGVP |
| | | | | SRFSGSGSGTDFTLTISSLQPEDFATYYCQQSYS |
| | | | | TPFTFGCGTKVEIKSGGGGSEVQLVESGGGLV |
| | | | | QPGGSLKLSCAASGFTFNKYAMNWVRQAPGK |
| | | | | GMEWVARIRSKYNNYATYYADAVKDRFTISR |
| | | | | DDSKNTLYLQMNNLKTEDTAVYYCVRAGNFG |
| | | | | SSYISYFAYWGQGTLVTVSSGGGGSGGGGSGG |
| | | | | GGSQTVVTQEPSLTVSPGGTVTITCGSSTGAVT |
| | | | | SGNYPNWIQKKPGQAPRGLIGGTKFLAPGTPA |
| | | | | RFSGSLEGGKAALTLSGVQPEDEAEYYCVLYY |
| | | | | SNRWVFGSGTKLTVLGGGGSGGGGSGGGGSD |
| | | | | KTHTCPPCPAPELLGGPSVFLFPPKPKDTLMISR |
| | | | | TPEVTCVVVDVSHEDPEVKFNWYVDGVEVHN |
| | | | | AKTKPCEEQYGSTYRCVSVLTVLHQDWLNGK |
| | | | | EYKCKVSNKALPAPIEKTISKAKGQPREPQVYT |
| | | | | LPPSREEMTKNQVSLTCLVKGFYPSDIAVEWES |
| | | | | NGQPENNYKTTPPVLDSDGSFFLYSKLTVDKS |
| | | | | RWQQGNVFSCSVMHEALHNHYTQKSLSLSPG |
| | | | | KGGGGSGGGGSGGGGSGGGGSGGGGSGGGGS |
| | | | | DKTHTCPPCPAPELLGGPSVFLFPPKPKDTLMIS |
| | | | | RTPEVTCVVVDVSHEDPEVKFNWYVDGVEVH |
| | | | | NAKTKPCEEQYGSTYRCVSVLTVLHQDWLNG |
| | | | | KEYKCKVSNKALPAPIEKTISKAKGQPREPQVY |
| | | | | TLPPSREEMTKNQVSLTCLVKGFYPSDIAVEWE |
| | | | | SNGQPENNYKTTPPVLDSDGSFFLYSKLTVDKS |
| | | | | RWQQGNVFSCSVMHEALHNHYTQKSLSLSPG |
| | | | | KGGGGSGGGGSGGGGSQVQLVQSGAEVKKPG |
| | | | | ASVKVSCKASGYTFTNYWMNWVRQAPGQCL |
| | | | | EWMGNIAYGVKGTNYNQKFQGRVTMTVDTSS |
| | | | | STAYMELSRLRSDDTAVYYCATRYFYVMDYW |
| | | | | GQGTLVTVSSGGGGSGGGGSGGGGSDIQMTQS |
| | | | | PSSLSASVGDRVTITCRASQDISNYLNWYQQKP |
| | | | | GKVPKLLIYYTSRLHSGVPSRFSGSGSGTDFTL |
| | | | | TISSLQPEDVATYYCVQYAQFPLTFGCGTKVEI |
| | | | | KSGGGGSEVQLVESGGGLVQPGGSLKLSCAAS |
| | | | | GFTFNKYAMNWVRQAPGKGMEWVARIRSKY |
| | | | | NNYATYYADAVKDRFTISRDDSKNTLYLQMN |
| | | | | NLKTEDTAVYYCVRAGNFGSSYISYFAYWGQ |
| | | | | GTLVTVSSGGGGSGGGGSGGGGSQTVVTQEPS |
| | | | | LTVSPGGTVTITCGSSTGAVTSGNYPNWIQKKP |
| | | | | GQAPRGLIGGTKFLAPGTPARFSGSLEGGKAAL |
| | | | | TLSGVQPEDEAEYYCVLYYSNRWVFGSGTKLT |
| | | | | VL |
| 302. | MS 15-B12 CC x | artificial | aa | QVQLQESGPGLVKPSETLSLTCTVSGGSISSSSY |
| | I2L x G4 x scFc x | | | FWGWIRQPPGKCLEWIGNIYYSGSSNYNPSLKS |
| | G4 x CH3 005-D5 | | | RVTISVDTSKNQFSLKLSSVTAADTAVYYCAR |
| | CC x I2L - Full | | | LPRGDRDAFDIWGQGTMVTVSSGGGGSGGGG |
| | Sequence | | | SGGGGSDIVMTQSPSSLSASVGDRVTITCRASQ |
| | | | | GISNYLAWYQQKPGKVPKLLIYAASTLQSGVP |
| | | | | SRFSGSGSGTDFTLTISSLQPEDFATYYCQQSYS |
| | | | | TPFTFGCGTKVEIKSGGGGSEVQLVESGGGLV |
| | | | | QPGGSLKLSCAASGFTFNKYAMNWVRQAPGK |
| | | | | GMEWVARIRSKYNNYATYYADAVKDRFTISR |
| | | | | DDSKNTLYLQMNNLKTEDTAVYYCVRAGNFG |
| | | | | SSYISYFAYWGQGTLVTVSSGGGGSGGGGSGG |
| | | | | GGSQTVVTQEPSLTVSPGGTVTITCGSSTGAVT |
| | | | | SGNYPNWIQKKPGQAPRGLIGGTKFLAPGTPA |
| | | | | RFSGSLEGGKAALTLSGVQPEDEAEYYCVLYY |
| | | | | SNRWVFGSGTKLTVLGGGGDKTHTCPPCPAPE |
| | | | | LLGGPSVFLFPPKPKDTLMISRTPEVTCVVVDV |
| | | | | SHEDPEVKFNWYVDGVEVHNAKTKPCEEQYG |
| | | | | STYRCVSVLTVLHQDWLNGKEYKCKVSNKAL |
| | | | | PAPIEKTISKAKGQPREPQVYTLPPSREEMTKN |
| | | | | QVSLTCLVKGFYPSDIAVEWESNGQPENNYKT |
| | | | | TPPVLDSDGSFFLYSKLTVDKSRWQQGNVFSC |
| | | | | SVMHEALHNHYTQKSLSLSPGKGGGGSGGGG |
| | | | | SGGGGSGGGGSGGGGSGGGGSDKTHTCPPCPA |
| | | | | PELLGGPSVFLFPPKPKDTLMISRTPEVTCVVV |
| | | | | DVSHEDPEVKFNWYVDGVEVHNAKTKPCEEQ |
| | | | | YGSTYRCVSVLTVLHQDWLNGKEYKCKVSNK |
| | | | | ALPAPIEKTISKAKGQPREPQVYTLPPSREEMT |
| | | | | KNQVSLTCLVKGFYPSDIAVEWESNGQPENNY |
| | | | | KTTPPVLDSDGSFFLYSKLTVDKSRWQQGNVF |
| | | | | SCSVMHEALHNHYTQKSLSLSPGKGGGGEVQL |
| | | | | LESGGGLVQPGGSLRLSCAASGFSFSSYPINWV |
| | | | | RQAPGKCLEWVGVIWTGGGTNYASSVKGRFTI |
| | | | | SRDNSKNTVYLQMNSLRAEDTAVYYCAKSRG |
| | | | | VYDFKGRGAMDYWGQGTLVTVSSGGGGSGG |
| | | | | GGSGGGGSDIVMTQSPDSLAVSLGERATINCKS |
| | | | | SQSLLYSSNQKNYFAWYQQKPGQPPKLLIYWA |
| | | | | STRESGVPDRFSGSGSGTDFTLTISSLQAEDVA |
| | | | | VYYCQQYYSYPYTFGCGTKLEIKSGGGGSEVQ |
| | | | | LVESGGGLVQPGGSLKLSCAASGFTFNKYAMN |
| | | | | WVRQAPGKGMEWVARIRSKYNNYATYYADA |
| | | | | VKDRFTISRDDSKNTLYLQMNNLKTEDTAVYY |
| | | | | CVRAGNFGSSYISYFAYWGQGTLVTVSSGGGG |
| | | | | SGGGGSGGGGSQTVVTQEPSLTVSPGGTVTITC |
| | | | | GSSTGAVTSGNYPNWIQKKPGQAPRGLIGGTK |
| | | | | FLAPGTPARFSGSLEGGKAALTLSGVQPEDEAE |
| | | | | YYCVLYYSNRWVFGSGTKLTVL |
| 303. | MS 15-B12 CC x | artificial | aa | QVQLQESGPGLVKPSETLSLTCTVSGGSISSSSY |
| | I2L x G4 x scFc x | | | FWGWIRQPPGKCLEWIGNIYYSGSSNYNPSLKS |
| | G4 x CH3 22-A12 | | | RVTISVDTSKNQFSLKLSSVTAADTAVYYCAR |
| | CC x I2L - Full | | | LPRGDRDAFDIWGQGTMVTVSSGGGGSGGGG |
| | Sequence | | | SGGGGSDIVMTQSPSSLSASVGDRVTITCRASQ |
| | | | | GISNYLAWYQQKPGKVPKLLIYAASTLQSGVP |
| | | | | SRFSGSGSGTDFTLTISSLQPEDFATYYCQQSYS |
| | | | | TPFTFGCGTKVEIKSGGGGSEVQLVESGGGLV |
| | | | | QPGGSLKLSCAASGFTFNKYAMNWVRQAPGK |
| | | | | GMEWVARIRSKYNNYATYYADAVKDRFTISR |
| | | | | DDSKNTLYLQMNNLKTEDTAVYYCVRAGNFG |
| | | | | SSYISYFAYWGQGTLVTVSSGGGGSGGGGSGG |
| | | | | GGSQTVVTQEPSLTVSPGGTVTITCGSSTGAVT |
| | | | | SGNYPNWIQKKPGQAPRGLIGGTKFLAPGTPA |
| | | | | RFSGSLEGGKAALTLSGVQPEDEAEYYCVLYY |
| | | | | SNRWVFGSGTKLTVLGGGGDKTHTCPPCPAPE |
| | | | | LLGGPSVFLFPPKPKDTLMISRTPEVTCVVVDV |
| | | | | SHEDPEVKFNWYVDGVEVHNAKTKPCEEQYG |
| | | | | STYRCVSVLTVLHQDWLNGKEYKCKVSNKAL |
| | | | | PAPIEKTISKAKGQPREPQVYTLPPSREEMTKN |
| | | | | QVSLTCLVKGFYPSDIAVEWESNGQPENNYKT |
| | | | | TPPVLDSDGSFFLYSKLTVDKSRWQQGNVFSC |
| | | | | SVMHEALHNHYTQKSLSLSPGKGGGGSGGGG |
| | | | | SGGGGSGGGGSGGGGSGGGGSDKTHTCPPCPA |
| | | | | PELLGGPSVFLFPPKPKDTLMISRTPEVTCVVV |
| | | | | DVSHEDPEVKFNWYVDGVEVHNAKTKPCEEQ |
| | | | | YGSTYRCVSVLTVLHQDWLNGKEYKCKVSNK |
| | | | | ALPAPIEKTISKAKGQPREPQVYTLPPSREEMT |
| | | | | KNQVSLTCLVKGFYPSDIAVEWESNGQPENNY |
| | | | | KTTPPVLDSDGSFFLYSKLTVDKSRWQQGNVF |
| | | | | SCSVMHEALHNHYTQKSLSLSPGKGGGGQVQ |
| | | | | LVQSGAEVVKPGASVKVSCKASGYTFTSSWM |
| | | | | NWVRQAPGQCLEWMGRIYTGTGETKYSGKFQ |
| | | | | GRVTITRDTSASTAYMELSSLTSEDTAVYYCAR |
| | | | | QRDYGALYAMDYWGQGTLVTVSSGGGGSGG |
| | | | | GGSGGGGSDIQLTQSPSFLSASVGDRVTITCRA |
| | | | | SDDIYSYLAWYQQKPGKAPKLLVYNAKTLAE |
| | | | | GVPSRFSGSGSGTEFTLTISSLQPEDFATYYCQN |
| | | | | HDRTPFTFGCGTKVDIKSGGGGSEVQLVESGG |
| | | | | GLVQPGGSLKLSCAASGFTFNKYAMNWVRQA |
| | | | | PGKGMEWVARIRSKYNNYATYYADAVKDRFT |
| | | | | ISRDDSKNTLYLQMNNLKTEDTAVYYCVRAG |
| | | | | NFGSSYISYFAYWGQGTLVTVSSGGGGSGGGG |
| | | | | SGGGGSQTVVTQEPSLTVSPGGTVTITCGSSTG |
| | | | | AVTSGNYPNWIQKKPGQAPRGLIGGTKFLAPG |
| | | | | TPARFSGSLEGGKAALTLSGVQPEDEAEYYCV |
| | | | | LYYSNRWVFGSGTKLTVL |
| 304. | MS 15-B12 CC x | artificial | Aa | QVQLQESGPGLVKPSETLSLTCTVSGGSISSSSY |
| | I2L x G4 x scFc x | | | FWGWIRQPPGKCLEWIGNIYYSGSSNYNPSLKS |
| | G4 x CH3 24-D7 | | | RVTISVDTSKNQFSLKLSSVTAADTAVYYCAR |
| | CC x I2L - Full | | | LPRGDRDAFDIWGQGTMVTVSSGGGGSGGGG |
| | Sequence | | | SGGGGSDIVMTQSPSSLSASVGDRVTITCRASQ |
| | | | | GISNYLAWYQQKPGKVPKLLIYAASTLQSGVP |
| | | | | SRFSGSGSGTDFTLTISSLQPEDFATYYCQQSYS |
| | | | | TPFTFGCGTKVEIKSGGGGSEVQLVESGGGLV |
| | | | | QPGGSLKLSCAASGFTFNKYAMNWVRQAPGK |
| | | | | GMEWVARIRSKYNNYATYYADAVKDRFTISR |
| | | | | DDSKNTLYLQMNNLKTEDTAVYYCVRAGNFG |
| | | | | SSYISYFAYWGQGTLVTVSSGGGGSGGGGSGG |
| | | | | GGSQTVVTQEPSLTVSPGGTVTITCGSSTGAVT |
| | | | | SGNYPNWIQKKPGQAPRGLIGGTKFLAPGTPA |
| | | | | RFSGSLEGGKAALTLSGVQPEDEAEYYCVLYY |
| | | | | SNRWVFGSGTKLTVLGGGGDKTHTCPPCPAPE |
| | | | | LLGGPSVFLFPPKPKDTLMISRTPEVTCVVVDV |
| | | | | SHEDPEVKFNWYVDGVEVHNAKTKPCEEQYG |
| | | | | STYRCVSVLTVLHQDWLNGKEYKCKVSNKAL |
| | | | | PAPIEKTISKAKGQPREPQVYTLPPSREEMTKN |
| | | | | QVSLTCLVKGFYPSDIAVEWESNGQPENNYKT |
| | | | | TPPVLDSDGSFFLYSKLTVDKSRWQQGNVFSC |
| | | | | SVMHEALHNHYTQKSLSLSPGKGGGGSGGGG |
| | | | | SGGGGSGGGGSGGGGSGGGGSDKTHTCPPCPA |
| | | | | PELLGGPSVFLFPPKPKDTLMISRTPEVTCVVV |
| | | | | DVSHEDPEVKFNWYVDGVEVHNAKTKPCEEQ |
| | | | | YGSTYRCVSVLTVLHQDWLNGKEYKCKVSNK |
| | | | | ALPAPIEKTISKAKGQPREPQVYTLPPSREEMT |
| | | | | KNQVSLTCLVKGFYPSDIAVEWESNGQPENNY |
| | | | | KTTPPVLDSDGSFFLYSKLTVDKSRWQQGNVF |
| | | | | SCSVMHEALHNHYTQKSLSLSPGKGGGGQVQ |
| | | | | LVQSGAEVKKPGASVKVSCKASGYTFTNYWM |
| | | | | NWVRQAPGQCLEWMGNIHSKAHGTNYNQKF |
| | | | | QGRVTMTVDTSSSTAYMELSRLRSDDTAVYY |
| | | | | CATRYFYVMDYWGQGTLVTVSSGGGGSGGG |
| | | | | GSGGGGSDIQMTQSPSSLSASVGDRVTITCRAS |
| | | | | QDISNYLNWYQQKPGKVPKLLIYYTSRLHSGV |
| | | | | PSRFSGSGSGTDFTLTISSLQPEDVATYYCVQY |
| | | | | AQFPLTFGCGTKVEIKSGGGGSEVQLVESGGG |
| | | | | LVQPGGSLKLSCAASGFTFNKYAMNWVRQAP |
| | | | | GKGMEWVARIRSKYNNYATYYADAVKDRFTI |
| | | | | SRDDSKNTLYLQMNNLKTEDTAVYYCVRAGN |
| | | | | FGSSYISYFAYWGQGTLVTVSSGGGGSGGGGS |
| | | | | GGGGSQTVVTQEPSLTVSPGGTVTITCGSSTGA |
| | | | | VTSGNYPNWIQKKPGQAPRGLIGGTKFLAPGT |
| | | | | PARFSGSLEGGKAALTLSGVQPEDEAEYYCVL |
| | | | | YYSNRWVFGSGTKLTVL |
| 305. | MS 15-B12 CC x | artificial | Aa | QVQLQESGPGLVKPSETLSLTCTVSGGSISSSSY |
| | I2L x G4S3 x scFc | | | FWGWIRQPPGKCLEWIGNIYYSGSSNYNPSLKS |
| | x G4S3 x CH3 22- | | | RVTISVDTSKNQFSLKLSSVTAADTAVYYCAR |
| | A12 CC x I2L - | | | LPRGDRDAFDIWGQGTMVTVSSGGGGSGGGG |
| | Full Sequence | | | SGGGGSDIVMTQSPSSLSASVGDRVTITCRASQ |
| | | | | GISNYLAWYQQKPGKVPKLLIYAASTLQSGVP |
| | | | | SRFSGSGSGTDFTLTISSLQPEDFATYYCQQSYS |
| | | | | TPFTFGCGTKVEIKSGGGGSEVQLVESGGGLV |
| | | | | QPGGSLKLSCAASGFTFNKYAMNWVRQAPGK |
| | | | | GMEWVARIRSKYNNYATYYADAVKDRFTISR |
| | | | | DDSKNTLYLQMNNLKTEDTAVYYCVRAGNFG |
| | | | | SSYISYFAYWGQGTLVTVSSGGGGSGGGGSGG |
| | | | | GGSQTVVTQEPSLTVSPGGTVTITCGSSTGAVT |
| | | | | SGNYPNWIQKKPGQAPRGLIGGTKFLAPGTPA |
| | | | | RFSGSLEGGKAALTLSGVQPEDEAEYYCVLYY |
| | | | | SNRWVFGSGTKLTVLGGGGSGGGGSGGGGSD |
| | | | | KTHTCPPCPAPELLGGPSVFLFPPKPKDTLMISR |
| | | | | TPEVTCVVVDVSHEDPEVKFNWYVDGVEVHN |
| | | | | AKTKPCEEQYGSTYRCVSVLTVLHQDWLNGK |
| | | | | EYKCKVSNKALPAPIEKTISKAKGQPREPQVYT |
| | | | | LPPSREEMTKNQVSLTCLVKGFYPSDIAVEWES |
| | | | | NGQPENNYKTTPPVLDSDGSFFLYSKLTVDKS |
| | | | | RWQQGNVFSCSVMHEALHNHYTQKSLSLSPG |
| | | | | KGGGGSGGGGSGGGGSGGGGSGGGGSGGGGS |
| | | | | DKTHTCPPCPAPELLGGPSVFLFPPKPKDTLMIS |
| | | | | RTPEVTCVVVDVSHEDPEVKFNWYVDGVEVH |
| | | | | NAKTKPCEEQYGSTYRCVSVLTVLHQDWLNG |
| | | | | KEYKCKVSNKALPAPIEKTISKAKGQPREPQVY |
| | | | | TLPPSREEMTKNQVSLTCLVKGFYPSDIAVEWE |
| | | | | SNGQPENNYKTTPPVLDSDGSFFLYSKLTVDKS |
| | | | | RWQQGNVFSCSVMHEALHNHYTQKSLSLSPG |
| | | | | KGGGGSGGGGSGGGGSQVQLVQSGAEVVKPG |
| | | | | ASVKVSCKASGYTFTSSWMNWVRQAPGQCLE |
| | | | | WMGRIYTGTGETKYSGKFQGRVTITRDTSAST |
| | | | | AYMELSSLTSEDTAVYYCARQRDYGALYAMD |
| | | | | YWGQGTLVTVSSGGGGSGGGGSGGGGSDIQL |
| | | | | TQSPSFLSASVGDRVTITCRASDDIYSYLAWYQ |
| | | | | QKPGKAPKLLVYNAKTLAEGVPSRFSGSGSGT |
| | | | | EFTLTISSLQPEDFATYYCQNHDRTPFTFGCGT |
| | | | | KVDIKSGGGGSEVQLVESGGGLVQPGGSLKLS |
| | | | | CAASGFTFNKYAMNWVRQAPGKGMEWVARI |
| | | | | RSKYNNYATYYADAVKDRFTISRDDSKNTLYL |
| | | | | QMNNLKTEDTAVYYCVRAGNFGSSYISYFAY |
| | | | | WGQGTLVTVSSGGGGSGGGGSGGGGSQTVVT |
| | | | | QEPSLTVSPGGTVTITCGSSTGAVTSGNYPNWI |
| | | | | QKKPGQAPRGLIGGTKFLAPGTPARFSGSLEGG |
| | | | | KAALTLSGVQPEDEAEYYCVLYYSNRWVFGS |
| | | | | GTKLTVL |
| 306. | MS 15-B12 CC x | artificial | Aa | QVQLQESGPGLVKPSETLSLTCTVSGGSISSSSY |
| | I2Lx G4 x scFc x | | | FWGWIRQPPGKCLEWIGNIYYSGSSNYNPSLKS |
| | G4 x CH3 26-E5 | | | RVTISVDTSKNQFSLKLSSVTAADTAVYYCAR |
| | CC x I2L - Full | | | LPRGDRDAFDIWGQGTMVTVSSGGGGSGGGG |
| | Sequence | | | SGGGGSDIVMTQSPSSLSASVGDRVTITCRASQ |
| | | | | GISNYLAWYQQKPGKVPKLLIYAASTLQSGVP |
| | | | | SRFSGSGSGTDFTLTISSLQPEDFATYYCQQSYS |
| | | | | TPFTFGCGTKVEIKSGGGGSEVQLVESGGGLV |
| | | | | QPGGSLKLSCAASGFTFNKYAMNWVRQAPGK |
| | | | | GMEWVARIRSKYNNYATYYADAVKDRFTISR |
| | | | | DDSKNTLYLQMNNLKTEDTAVYYCVRAGNFG |
| | | | | SSYISYFAYWGQGTLVTVSSGGGGSGGGGSGG |
| | | | | GGSQTVVTQEPSLTVSPGGTVTITCGSSTGAVT |
| | | | | SGNYPNWIQKKPGQAPRGLIGGTKFLAPGTPA |
| | | | | RFSGSLEGGKAALTLSGVQPEDEAEYYCVLYY |
| | | | | SNRWVFGSGTKLTVLGGGGDKTHTCPPCPAPE |
| | | | | LLGGPSVFLFPPKPKDTLMISRTPEVTCVVVDV |
| | | | | SHEDPEVKFNWYVDGVEVHNAKTKPCEEQYG |
| | | | | STYRCVSVLTVLHQDWLNGKEYKCKVSNKAL |
| | | | | PAPIEKTISKAKGQPREPQVYTLPPSREEMTKN |
| | | | | QVSLTCLVKGFYPSDIAVEWESNGQPENNYKT |
| | | | | TPPVLDSDGSFFLYSKLTVDKSRWQQGNVFSC |
| | | | | SVMHEALHNHYTQKSLSLSPGKGGGGSGGGG |
| | | | | SGGGGSGGGGSGGGGSGGGGSDKTHTCPPCPA |
| | | | | PELLGGPSVFLFPPKPKDTLMISRTPEVTCVVV |
| | | | | DVSHEDPEVKFNWYVDGVEVHNAKTKPCEEQ |
| | | | | YGSTYRCVSVLTVLHQDWLNGKEYKCKVSNK |
| | | | | ALPAPIEKTISKAKGQPREPQVYTLPPSREEMT |
| | | | | KNQVSLTCLVKGFYPSDIAVEWESNGQPENNY |
| | | | | KTTPPVLDSDGSFFLYSKLTVDKSRWQQGNVF |
| | | | | SCSVMHEALHNHYTQKSLSLSPGKGGGGQVQ |
| | | | | LVQSGAEVKKPGASVKVSCKASGYTFTSYWM |
| | | | | HWVRQAPGQCLEWMGVIRTSTSYTIYNQKFK |
| | | | | GRVTMTRDTSTSTVYMELSSLRSEDTAVYYCA |
| | | | | RSGPGYFDVWGQGTMVTVSSGGGGSGGGGSG |
| | | | | GGGSDIQLTQSPSFLSASVGDRVTITCRASENIY |
| | | | | SYLAWYQQKPGKAPKLLIYNAKTLAEGVPSRF |
| | | | | SGSGSGTEFTLTISSLQPEDFATYYCQHNYGTP |
| | | | | YTFGCGTKLEIKSGGGGSEVQLVESGGGLVQP |
| | | | | GGSLKLSCAASGFTFNKYAMNWVRQAPGKG |
| | | | | MEWVARIRSKYNNYATYYADAVKDRFTISRD |
| | | | | DSKNTLYLQMNNLKTEDTAVYYCVRAGNFGS |
| | | | | SYISYFAYWGQGTLVTVSSGGGGSGGGGSGGG |
| | | | | GSQTVVTQEPSLTVSPGGTVTITCGSSTGAVTS |
| | | | | GNYPNWIQKKPGQAPRGLIGGTKFLAPGTPAR |
| | | | | FSGSLEGGKAALTLSGVQPEDEAEYYCVLYYS |
| | | | | NRWVFGSGTKLTVL |
| 307. | MS 15-B12 CC x | artificial | Aa | QVQLQESGPGLVKPSETLSLTCTVSGGSISSSSY |
| | I2M2 x G4 x scfc | | | FWGWIRQPPGKCLEWIGNIYYSGSSNYNPSLKS |
| | x G4 x CH3 22- | | | RVTISVDTSKNQFSLKLSSVTAADTAVYYCAR |
| | A12 CC x I2M2 - | | | LPRGDRDAFDIWGQGTMVTVSSGGGGSGGGG |
| | Full Sequence | | | SGGGGSDIVMTQSPSSLSASVGDRVTITCRASQ |
| | | | | GISNYLAWYQQKPGKVPKLLIYAASTLQSGVP |
| | | | | SRFSGSGSGTDFTLTISSLQPEDFATYYCQQSYS |
| | | | | TPFTFGCGTKVEIKSGGGGSEVQLVESGGGLV |
| | | | | QPGGSLKLSCAASGFTFNKYAINWVREAPGKG |
| | | | | LEWVARIRSKYNNYATYYADAVKDRFTISRDD |
| | | | | SKNTAYLQMNNLKTEDTAVYYCVRNANFGTS |
| | | | | YISYFAYWGQGTLVTVSSGGGGSGGGGSGGG |
| | | | | GSQTVVTQEPSLTVSPGGTVTLTCGSSTGAVTS |
| | | | | GNYPNWVQKKPGQAPRGLIGGTKFLAPGTPAR |
| | | | | FSGSLLGGKAALTLSGVQPEDEAEYYCVLWYS |
| | | | | NRWVFGSGTKLTVLGGGGDKTHTCPPCPAPEL |
| | | | | LGGPSVFLFPPKPKDTLMISRTPEVTCVVVDVS |
| | | | | HEDPEVKFNWYVDGVEVHNAKTKPCEEQYGS |
| | | | | TYRCVSVLTVLHQDWLNGKEYKCKVSNKALP |
| | | | | APIEKTISKAKGQPREPQVYTLPPSREEMTKNQ |
| | | | | VSLTCLVKGFYPSDIAVEWESNGQPENNYKTT |
| | | | | PPVLDSDGSFFLYSKLTVDKSRWQQGNVFSCS |
| | | | | VMHEALHNHYTQKSLSLSPGKGGGGSGGGGS |
| | | | | GGGGSGGGGSGGGGSGGGGSDKTHTCPPCPAP |
| | | | | ELLGGPSVFLFPPKPKDTLMISRTPEVTCVVVD |
| | | | | VSHEDPEVKFNWYVDGVEVHNAKTKPCEEQY |
| | | | | GSTYRCVSVLTVLHQDWLNGKEYKCKVSNKA |
| | | | | LPAPIEKTISKAKGQPREPQVYTLPPSREEMTK |
| | | | | NQVSLTCLVKGFYPSDIAVEWESNGQPENNYK |
| | | | | TTPPVLDSDGSFFLYSKLTVDKSRWQQGNVFS |
| | | | | CSVMHEALHNHYTQKSLSLSPGKGGGGQVQL |
| | | | | VQSGAEVVKPGASVKVSCKASGYTFTSSWMN |
| | | | | WVRQAPGQCLEWMGRIYTGTGETKYSGKFQG |
| | | | | RVTITRDTSASTAYMELSSLTSEDTAVYYCARQ |
| | | | | RDYGALYAMDYWGQGTLVTVSSGGGGSGGG |
| | | | | GSGGGGSDIQLTQSPSFLSASVGDRVTITCRAS |
| | | | | DDIYSYLAWYQQKPGKAPKLLVYNAKTLAEG |
| | | | | VPSRFSGSGSGTEFTLTISSLQPEDFATYYCQNH |
| | | | | DRTPFTFGCGTKVDIKSGGGGSEVQLVESGGG |
| | | | | LVQPGGSLKLSCAASGFTFNKYAINWVREAPG |
| | | | | KGLEWVARIRSKYNNYATYYADAVKDRFTISR |
| | | | | DDSKNTAYLQMNNLKTEDTAVYYCVRNANFG |
| | | | | TSYISYFAYWGQGTLVTVSSGGGGSGGGGSGG |
| | | | | GGSQTVVTQEPSLTVSPGGTVTLTCGSSTGAVT |
| | | | | SGNYPNWVQKKPGQAPRGLIGGTKFLAPGTPA |
| | | | | RFSGSLLGGKAALTLSGVQPEDEAEYYCVLWY |
| | | | | SNRWVFGSGTKLTVL |
| 308. | MS 15-B12 CC x | artificial | Aa | QVQLQESGPGLVKPSETLSLTCTVSGGSISSSSY |
| | I2M2 x G4 x | | | FWGWIRQPPGKCLEWIGNIYYSGSSNYNPSLKS |
| | scfc x G4 x CH3 | | | RVTISVDTSKNQFSLKLSSVTAADTAVYYCAR |
| | 24-D7 CC x I2M2 - | | | LPRGDRDAFDIWGQGTMVTVSSGGGGSGGGG |
| | Full Sequence | | | SGGGGSDIVMTQSPSSLSASVGDRVTITCRASQ |
| | | | | GISNYLAWYQQKPGKVPKLLIYAASTLQSGVP |
| | | | | SRFSGSGSGTDFTLTISSLQPEDFATYYCQQSYS |
| | | | | TPFTFGCGTKVEIKSGGGGSEVQLVESGGGLV |
| | | | | QPGGSLKLSCAASGFTFNKYAINWVREAPGKG |
| | | | | LEWVARIRSKYNNYATYYADAVKDRFTISRDD |
| | | | | SKNTAYLQMNNLKTEDTAVYYCVRNANFGTS |
| | | | | YISYFAYWGQGTLVTVSSGGGGSGGGGSGGG |
| | | | | GSQTVVTQEPSLTVSPGGTVTLTCGSSTGAVTS |
| | | | | GNYPNWVQKKPGQAPRGLIGGTKFLAPGTPAR |
| | | | | FSGSLLGGKAALTLSGVQPEDEAEYYCVLWYS |
| | | | | NRWVFGSGTKLTVLGGGGDKTHTCPPCPAPEL |
| | | | | LGGPSVFLFPPKPKDTLMISRTPEVTCVVVDVS |
| | | | | HEDPEVKFNWYVDGVEVHNAKTKPCEEQYGS |
| | | | | TYRCVSVLTVLHQDWLNGKEYKCKVSNKALP |
| | | | | APIEKTISKAKGQPREPQVYTLPPSREEMTKNQ |
| | | | | VSLTCLVKGFYPSDIAVEWESNGQPENNYKTT |
| | | | | PPVLDSDGSFFLYSKLTVDKSRWQQGNVFSCS |
| | | | | VMHEALHNHYTQKSLSLSPGKGGGGSGGGGS |
| | | | | GGGGSGGGGSGGGGSGGGGSDKTHTCPPCPAP |
| | | | | ELLGGPSVFLFPPKPKDTLMISRTPEVTCVVVD |
| | | | | VSHEDPEVKFNWYVDGVEVHNAKTKPCEEQY |
| | | | | GSTYRCVSVLTVLHQDWLNGKEYKCKVSNKA |
| | | | | LPAPIEKTISKAKGQPREPQVYTLPPSREEMTK |
| | | | | NQVSLTCLVKGFYPSDIAVEWESNGQPENNYK |
| | | | | TTPPVLDSDGSFFLYSKLTVDKSRWQQGNVFS |
| | | | | CSVMHEALHNHYTQKSLSLSPGKGGGGQVQL |
| | | | | VQSGAEVKKPGASVKVSCKASGYTFTNYWMN |
| | | | | WVRQAPGQCLEWMGNIHSKAHGTNYNQKFQ |
| | | | | GRVTMTVDTSSSTAYMELSRLRSDDTAVYYC |
| | | | | ATRYFYVMDYWGQGTLVTVSSGGGGSGGGGS |
| | | | | GGGGSDIQMTQSPSSLSASVGDRVTITCRASQD |
| | | | | ISNYLNWYQQKPGKVPKLLIYYTSRLHSGVPSR |
| | | | | FSGSGSGTDFTLTISSLQPEDVATYYCVQYAQF |
| | | | | PLTFGCGTKVEIKSGGGGSEVQLVESGGGLVQ |
| | | | | PGGSLKLSCAASGFTFNKYAINWVREAPGKGL |
| | | | | EWVARIRSKYNNYATYYADAVKDRFTISRDDS |
| | | | | KNTAYLQMNNLKTEDTAVYYCVRNANFGTSY |
| | | | | ISYFAYWGQGTLVTVSSGGGGSGGGGSGGGGS |
| | | | | QTVVTQEPSLTVSPGGTVTLTCGSSTGAVTSGN |
| | | | | YPNWVQKKPGQAPRGLIGGTKFLAPGTPARFS |
| | | | | GSLLGGKAALTLSGVQPEDEAEYYCVLWYSN |
| | | | | RWVFGSGTKLTVL |
| 309. | MS 15-B12 CC x | artificial | Aa | QVQLQESGPGLVKPSETLSLTCTVSGGSISSSSY |
| | I2M2 x G4 x scfc | | | FWGWIRQPPGKCLEWIGNIYYSGSSNYNPSLKS |
| | x G4 x CH3 005- | | | RVTISVDTSKNQFSLKLSSVTAADTAVYYCAR |
| | D5 CC x I2M2 - | | | LPRGDRDAFDIWGQGTMVTVSSGGGGSGGGG |
| | Full Sequence | | | SGGGGSDIVMTQSPSSLSASVGDRVTITCRASQ |
| | | | | GISNYLAWYQQKPGKVPKLLIYAASTLQSGVP |
| | | | | SRFSGSGSGTDFTLTISSLQPEDFATYYCQQSYS |
| | | | | TPFTFGCGTKVEIKSGGGGSEVQLVESGGGLV |
| | | | | QPGGSLKLSCAASGFTFNKYAINWVREAPGKG |
| | | | | LEWVARIRSKYNNYATYYADAVKDRFTISRDD |
| | | | | SKNTAYLQMNNLKTEDTAVYYCVRNANFGTS |
| | | | | YISYFAYWGQGTLVTVSSGGGGSGGGGSGGG |
| | | | | GSQTVVTQEPSLTVSPGGTVTLTCGSSTGAVTS |
| | | | | GNYPNWVQKKPGQAPRGLIGGTKFLAPGTPAR |
| | | | | FSGSLLGGKAALTLSGVQPEDEAEYYCVLWYS |
| | | | | NRWVFGSGTKLTVLGGGGDKTHTCPPCPAPEL |
| | | | | LGGPSVFLFPPKPKDTLMISRTPEVTCVVVDVS |
| | | | | HEDPEVKFNWYVDGVEVHNAKTKPCEEQYGS |
| | | | | TYRCVSVLTVLHQDWLNGKEYKCKVSNKALP |
| | | | | APIEKTISKAKGQPREPQVYTLPPSREEMTKNQ |
| | | | | VSLTCLVKGFYPSDIAVEWESNGQPENNYKTT |
| | | | | PPVLDSDGSFFLYSKLTVDKSRWQQGNVFSCS |
| | | | | VMHEALHNHYTQKSLSLSPGKGGGGSGGGGS |
| | | | | GGGGSGGGGSGGGGSGGGGSDKTHTCPPCPAP |
| | | | | ELLGGPSVFLFPPKPKDTLMISRTPEVTCVVVD |
| | | | | VSHEDPEVKFNWYVDGVEVHNAKTKPCEEQY |
| | | | | GSTYRCVSVLTVLHQDWLNGKEYKCKVSNKA |
| | | | | LPAPIEKTISKAKGQPREPQVYTLPPSREEMTK |
| | | | | NQVSLTCLVKGFYPSDIAVEWESNGQPENNYK |
| | | | | TTPPVLDSDGSFFLYSKLTVDKSRWQQGNVFS |
| | | | | CSVMHEALHNHYTQKSLSLSPGKGGGGEVQL |
| | | | | LESGGGLVQPGGSLRLSCAASGFSFSSYPINWV |
| | | | | RQAPGKCLEWVGVIWTGGGTNYASSVKGRFTI |
| | | | | SRDNSKNTVYLQMNSLRAEDTAVYYCAKSRG |
| | | | | VYDFKGRGAMDYWGQGTLVTVSSGGGGSGG |
| | | | | GGSGGGGSDIVMTQSPDSLAVSLGERATINCKS |
| | | | | SQSLLYSSNQKNYFAWYQQKPGQPPKLLIYWA |
| | | | | STRESGVPDRFSGSGSGTDFTLTISSLQAEDVA |
| | | | | VYYCQQYYSYPYTFGCGTKLEIKSGGGGSEVQ |
| | | | | LVESGGGLVQPGGSLKLSCAASGFTFNKYAIN |
| | | | | WVREAPGKGLEWVARIRSKYNNYATYYADA |
| | | | | VKDRFTISRDDSKNTAYLQMNNLKTEDTAVY |
| | | | | YCVRNANFGTSYISYFAYWGQGTLVTVSSGGG |
| | | | | GSGGGGSGGGGSQTVVTQEPSLTVSPGGTVTL |
| | | | | TCGSSTGAVTSGNYPNWVQKKPGQAPRGLIGG |
| | | | | TKFLAPGTPARFSGSLLGGKAALTLSGVQPEDE |
| | | | | AEYYCVLWYSNRWVFGSGTKLTVL |
| 310. | MS 15-B12 CC x | artificial | Aa | QVQLQESGPGLVKPSETLSLTCTVSGGSISSSSY |
| | I2M2 x G4 x scfc | | | FWGWIRQPPGKCLEWIGNIYYSGSSNYNPSLKS |
| | x G4 x CH3 26-E5 | | | RVTISVDTSKNQFSLKLSSVTAADTAVYYCAR |
| | CC x I2M2 - Full | | | LPRGDRDAFDIWGQGTMVTVSSGGGGSGGGG |
| | Sequence | | | SGGGGSDIVMTQSPSSLSASVGDRVTITCRASQ |
| | | | | GISNYLAWYQQKPGKVPKLLIYAASTLQSGVP |
| | | | | SRFSGSGSGTDFTLTISSLQPEDFATYYCQQSYS |
| | | | | TPFTFGCGTKVEIKSGGGGSEVQLVESGGGLV |
| | | | | QPGGSLKLSCAASGFTFNKYAINWVREAPGKG |
| | | | | LEWVARIRSKYNNYATYYADAVKDRFTISRDD |
| | | | | SKNTAYLQMNNLKTEDTAVYYCVRNANFGTS |
| | | | | YISYFAYWGQGTLVTVSSGGGGSGGGGSGGG |
| | | | | GSQTVVTQEPSLTVSPGGTVTLTCGSSTGAVTS |
| | | | | GNYPNWVQKKPGQAPRGLIGGTKFLAPGTPAR |
| | | | | FSGSLLGGKAALTLSGVQPEDEAEYYCVLWYS |
| | | | | NRWVFGSGTKLTVLGGGGDKTHTCPPCPAPEL |
| | | | | LGGPSVFLFPPKPKDTLMISRTPEVTCVVVDVS |
| | | | | HEDPEVKFNWYVDGVEVHNAKTKPCEEQYGS |
| | | | | TYRCVSVLTVLHQDWLNGKEYKCKVSNKALP |
| | | | | APIEKTISKAKGQPREPQVYTLPPSREEMTKNQ |
| | | | | VSLTCLVKGFYPSDIAVEWESNGQPENNYKTT |
| | | | | PPVLDSDGSFFLYSKLTVDKSRWQQGNVFSCS |
| | | | | VMHEALHNHYTQKSLSLSPGKGGGGSGGGGS |
| | | | | GGGGSGGGGSGGGGSGGGGSDKTHTCPPCPAP |
| | | | | ELLGGPSVFLFPPKPKDTLMISRTPEVTCVVVD |
| | | | | VSHEDPEVKFNWYVDGVEVHNAKTKPCEEQY |
| | | | | GSTYRCVSVLTVLHQDWLNGKEYKCKVSNKA |
| | | | | LPAPIEKTISKAKGQPREPQVYTLPPSREEMTK |
| | | | | NQVSLTCLVKGFYPSDIAVEWESNGQPENNYK |
| | | | | TTPPVLDSDGSFFLYSKLTVDKSRWQQGNVFS |
| | | | | CSVMHEALHNHYTQKSLSLSPGKGGGGQVQL |
| | | | | VQSGAEVKKPGASVKVSCKASGYTFTSYWMH |
| | | | | WVRQAPGQCLEWMGVIRTSTSYTIYNQKFKG |
| | | | | RVTMTRDTSTSTVYMELSSLRSEDTAVYYCAR |
| | | | | SGPGYFDVWGQGTMVTVSSGGGGSGGGGSGG |
| | | | | GGSDIQLTQSPSFLSASVGDRVTITCRASENIYS |
| | | | | YLAWYQQKPGKAPKLLIYNAKTLAEGVPSRES |
| | | | | GSGSGTEFTLTISSLQPEDFATYYCQHNYGTPY |
| | | | | TFGCGTKLEIKSGGGGSEVQLVESGGGLVQPG |
| | | | | GSLKLSCAASGFTFNKYAINWVREAPGKGLEW |
| | | | | VARIRSKYNNYATYYADAVKDRFTISRDDSKN |
| | | | | TAYLQMNNLKTEDTAVYYCVRNANFGTSYIS |
| | | | | YFAYWGQGTLVTVSSGGGGSGGGGSGGGGSQ |
| | | | | TVVTQEPSLTVSPGGTVTLTCGSSTGAVTSGNY |
| | | | | PNWVQKKPGQAPRGLIGGTKFLAPGTPARFSG |
| | | | | SLLGGKAALTLSGVQPEDEAEYYCVLWYSNR |
| | | | | WVFGSGTKLTVL |
| 311. | MS 15-B12 CC x | artificial | Aa | QVQLQESGPGLVKPSETLSLTCTVSGGSISSSSY |
| | I2M2 x G4S3 x | | | FWGWIRQPPGKCLEWIGNIYYSGSSNYNPSLKS |
| | scFc x G4S3 x | | | RVTISVDTSKNQFSLKLSSVTAADTAVYYCAR |
| | CH3 22-A12 CC x | | | LPRGDRDAFDIWGQGTMVTVSSGGGGSGGGG |
| | I2M2 - Full | | | SGGGGSDIVMTQSPSSLSASVGDRVTITCRASQ |
| | Sequence | | | GISNYLAWYQQKPGKVPKLLIYAASTLQSGVP |
| | | | | SRFSGSGSGTDFTLTISSLQPEDFATYYCQQSYS |
| | | | | TPFTFGCGTKVEIKSGGGGSEVQLVESGGGLV |
| | | | | QPGGSLKLSCAASGFTFNKYAINWVREAPGKG |
| | | | | LEWVARIRSKYNNYATYYADAVKDRFTISRDD |
| | | | | SKNTAYLQMNNLKTEDTAVYYCVRNANFGTS |
| | | | | YISYFAYWGQGTLVTVSSGGGGSGGGGSGGG |
| | | | | GSQTVVTQEPSLTVSPGGTVTLTCGSSTGAVTS |
| | | | | GNYPNWVQKKPGQAPRGLIGGTKFLAPGTPAR |
| | | | | FSGSLLGGKAALTLSGVQPEDEAEYYCVLWYS |
| | | | | NRWVFGSGTKLTVLGGGGSGGGGSGGGGSDK |
| | | | | THTCPPCPAPELLGGPSVFLFPPKPKDTLMISRT |
| | | | | PEVTCVVVDVSHEDPEVKFNWYVDGVEVHNA |
| | | | | KTKPCEEQYGSTYRCVSVLTVLHQDWLNGKE |
| | | | | YKCKVSNKALPAPIEKTISKAKGQPREPQVYTL |
| | | | | PPSREEMTKNQVSLTCLVKGFYPSDIAVEWES |
| | | | | NGQPENNYKTTPPVLDSDGSFFLYSKLTVDKS |
| | | | | RWQQGNVFSCSVMHEALHNHYTQKSLSLSPG |
| | | | | KGGGGSGGGGSGGGGSGGGGSGGGGSGGGGS |
| | | | | DKTHTCPPCPAPELLGGPSVFLFPPKPKDTLMIS |
| | | | | RTPEVTCVVVDVSHEDPEVKFNWYVDGVEVH |
| | | | | NAKTKPCEEQYGSTYRCVSVLTVLHQDWLNG |
| | | | | KEYKCKVSNKALPAPIEKTISKAKGQPREPQVY |
| | | | | TLPPSREEMTKNQVSLTCLVKGFYPSDIAVEWE |
| | | | | SNGQPENNYKTTPPVLDSDGSFFLYSKLTVDKS |
| | | | | RWQQGNVFSCSVMHEALHNHYTQKSLSLSPG |
| | | | | KGGGGSGGGGSGGGGSQVQLVQSGAEVVKPG |
| | | | | ASVKVSCKASGYTFTSSWMNWVRQAPGQCLE |
| | | | | WMGRIYTGTGETKYSGKFQGRVTITRDTSAST |
| | | | | AYMELSSLTSEDTAVYYCARQRDYGALYAMD |
| | | | | YWGQGTLVTVSSGGGGSGGGGSGGGGSDIQL |
| | | | | TQSPSFLSASVGDRVTITCRASDDIYSYLAWYQ |
| | | | | QKPGKAPKLLVYNAKTLAEGVPSRFSGSGSGT |
| | | | | EFTLTISSLQPEDFATYYCQNHDRTPFTFGCGT |
| | | | | KVDIKSGGGGSEVQLVESGGGLVQPGGSLKLS |
| | | | | CAASGFTFNKYAINWVREAPGKGLEWVARIRS |
| | | | | KYNNYATYYADAVKDRFTISRDDSKNTAYLQ |
| | | | | MNNLKTEDTAVYYCVRNANFGTSYISYFAYW |
| | | | | GQGTLVTVSSGGGGSGGGGSGGGGSQTVVTQ |
| | | | | EPSLTVSPGGTVTLTCGSSTGAVTSGNYPNWV |
| | | | | QKKPGQAPRGLIGGTKFLAPGTPARFSGSLLGG |
| | | | | KAALTLSGVQPEDEAEYYCVLWYSNRWVFGS |
| | | | | GTKLTVL |
| 312. | MS 15-B12 CC x | artificial | Aa | QVQLQESGPGLVKPSETLSLTCTVSGGSISSSSY |
| | I2M2 x G4S3 x | | | FWGWIRQPPGKCLEWIGNIYYSGSSNYNPSLKS |
| | scFc x G4S3 x | | | RVTISVDTSKNQFSLKLSSVTAADTAVYYCAR |
| | CH3 005-D5 CC x | | | LPRGDRDAFDIWGQGTMVTVSSGGGGSGGGG |
| | I2M2 - Full | | | SGGGGSDIVMTQSPSSLSASVGDRVTITCRASQ |
| | Sequence | | | GISNYLAWYQQKPGKVPKLLIYAASTLQSGVP |
| | | | | SRFSGSGSGTDFTLTISSLQPEDFATYYCQQSYS |
| | | | | TPFTFGCGTKVEIKSGGGGSEVQLVESGGGLV |
| | | | | QPGGSLKLSCAASGFTFNKYAINWVREAPGKG |
| | | | | LEWVARIRSKYNNYATYYADAVKDRFTISRDD |
| | | | | SKNTAYLQMNNLKTEDTAVYYCVRNANFGTS |
| | | | | YISYFAYWGQGTLVTVSSGGGGSGGGGSGGG |
| | | | | GSQTVVTQEPSLTVSPGGTVTLTCGSSTGAVTS |
| | | | | GNYPNWVQKKPGQAPRGLIGGTKFLAPGTPAR |
| | | | | FSGSLLGGKAALTLSGVQPEDEAEYYCVLWYS |
| | | | | NRWVFGSGTKLTVLGGGGSGGGGSGGGGSDK |
| | | | | THTCPPCPAPELLGGPSVFLFPPKPKDTLMISRT |
| | | | | PEVTCVVVDVSHEDPEVKFNWYVDGVEVHNA |
| | | | | KTKPCEEQYGSTYRCVSVLTVLHQDWLNGKE |
| | | | | YKCKVSNKALPAPIEKTISKAKGQPREPQVYTL |
| | | | | PPSREEMTKNQVSLTCLVKGFYPSDIAVEWES |
| | | | | NGQPENNYKTTPPVLDSDGSFFLYSKLTVDKS |
| | | | | RWQQGNVFSCSVMHEALHNHYTQKSLSLSPG |
| | | | | KGGGGSGGGGSGGGGSGGGGSGGGGSGGGGS |
| | | | | DKTHTCPPCPAPELLGGPSVFLFPPKPKDTLMIS |
| | | | | RTPEVTCVVVDVSHEDPEVKFNWYVDGVEVH |
| | | | | NAKTKPCEEQYGSTYRCVSVLTVLHQDWLNG |
| | | | | KEYKCKVSNKALPAPIEKTISKAKGQPREPQVY |
| | | | | TLPPSREEMTKNQVSLTCLVKGFYPSDIAVEWE |
| | | | | SNGQPENNYKTTPPVLDSDGSFFLYSKLTVDKS |
| | | | | RWQQGNVFSCSVMHEALHNHYTQKSLSLSPG |
| | | | | KGGGGSGGGGSGGGGSEVQLLESGGGLVQPG |
| | | | | GSLRLSCAASGFSFSSYPINWVRQAPGKCLEW |
| | | | | VGVIWTGGGTNYASSVKGRFTISRDNSKNTVY |
| | | | | LQMNSLRAEDTAVYYCAKSRGVYDFKGRGA |
| | | | | MDYWGQGTLVTVSSGGGGSGGGGSGGGGSDI |
| | | | | VMTQSPDSLAVSLGERATINCKSSQSLLYSSNQ |
| | | | | KNYFAWYQQKPGQPPKLLIYWASTRESGVPDR |
| | | | | FSGSGSGTDFTLTISSLQAEDVAVYYCQQYYSY |
| | | | | PYTFGCGTKLEIKSGGGGSEVQLVESGGGLVQ |
| | | | | PGGSLKLSCAASGFTFNKYAINWVREAPGKGL |
| | | | | EWVARIRSKYNNYATYYADAVKDRFTISRDDS |
| | | | | KNTAYLQMNNLKTEDTAVYYCVRNANFGTSY |
| | | | | ISYFAYWGQGTLVTVSSGGGGSGGGGSGGGGS |
| | | | | QTVVTQEPSLTVSPGGTVTLTCGSSTGAVTSGN |
| | | | | YPNWVQKKPGQAPRGLIGGTKFLAPGTPARFS |
| | | | | GSLLGGKAALTLSGVQPEDEAEYYCVLWYSN |
| | | | | RWVFGSGTKLTVL |
| 313. | MS 15-B12 CC x | artificial | aa | QVQLQESGPGLVKPSETLSLTCTVSGGSISSSSY |
| | I2M2 x G4S3 x | | | FWGWIRQPPGKCLEWIGNIYYSGSSNYNPSLKS |
| | scFc x G4S3 x | | | RVTISVDTSKNQFSLKLSSVTAADTAVYYCAR |
| | CH3 26-E5 CC x | | | LPRGDRDAFDIWGQGTMVTVSSGGGGSGGGG |
| | I2M2 - Full | | | SGGGGSDIVMTQSPSSLSASVGDRVTITCRASQ |
| | Sequence | | | GISNYLAWYQQKPGKVPKLLIYAASTLQSGVP |
| | | | | SRFSGSGSGTDFTLTISSLQPEDFATYYCQQSYS |
| | | | | TPFTFGCGTKVEIKSGGGGSEVQLVESGGGLV |
| | | | | QPGGSLKLSCAASGFTFNKYAINWVREAPGKG |
| | | | | LEWVARIRSKYNNYATYYADAVKDRFTISRDD |
| | | | | SKNTAYLQMNNLKTEDTAVYYCVRNANFGTS |
| | | | | YISYFAYWGQGTLVTVSSGGGGSGGGGSGGG |
| | | | | GSQTVVTQEPSLTVSPGGTVTLTCGSSTGAVTS |
| | | | | GNYPNWVQKKPGQAPRGLIGGTKFLAPGTPAR |
| | | | | FSGSLLGGKAALTLSGVQPEDEAEYYCVLWYS |
| | | | | NRWVFGSGTKLTVLGGGGSGGGGSGGGGSDK |
| | | | | THTCPPCPAPELLGGPSVFLFPPKPKDTLMISRT |
| | | | | PEVTCVVVDVSHEDPEVKFNWYVDGVEVHNA |
| | | | | KTKPCEEQYGSTYRCVSVLTVLHQDWLNGKE |
| | | | | YKCKVSNKALPAPIEKTISKAKGQPREPQVYTL |
| | | | | PPSREEMTKNQVSLTCLVKGFYPSDIAVEWES |
| | | | | NGQPENNYKTTPPVLDSDGSFFLYSKLTVDKS |
| | | | | RWQQGNVFSCSVMHEALHNHYTQKSLSLSPG |
| | | | | KGGGGSGGGGSGGGGSGGGGSGGGGSGGGGS |
| | | | | DKTHTCPPCPAPELLGGPSVFLFPPKPKDTLMIS |
| | | | | RTPEVTCVVVDVSHEDPEVKFNWYVDGVEVH |
| | | | | NAKTKPCEEQYGSTYRCVSVLTVLHQDWLNG |
| | | | | KEYKCKVSNKALPAPIEKTISKAKGQPREPQVY |
| | | | | TLPPSREEMTKNQVSLTCLVKGFYPSDIAVEWE |
| | | | | SNGQPENNYKTTPPVLDSDGSFFLYSKLTVDKS |
| | | | | RWQQGNVFSCSVMHEALHNHYTQKSLSLSPG |
| | | | | KGGGGSGGGGSGGGGSQVQLVQSGAEVKKPG |
| | | | | ASVKVSCKASGYTFTSYWMHWVRQAPGQCLE |
| | | | | WMGVIRTSTSYTIYNQKFKGRVTMTRDTSTST |
| | | | | VYMELSSLRSEDTAVYYCARSGPGYFDVWGQ |
| | | | | GTMVTVSSGGGGSGGGGSGGGGSDIQLTQSPS |
| | | | | FLSASVGDRVTITCRASENIYSYLAWYQQKPG |
| | | | | KAPKLLIYNAKTLAEGVPSRFSGSGSGTEFTLTI |
| | | | | SSLQPEDFATYYCQHNYGTPYTFGCGTKLEIKS |
| | | | | GGGGSEVQLVESGGGLVQPGGSLKLSCAASGF |
| | | | | TFNKYAINWVREAPGKGLEWVARIRSKYNNY |
| | | | | ATYYADAVKDRFTISRDDSKNTAYLQMNNLK |
| | | | | TEDTAVYYCVRNANFGTSYISYFAYWGQGTL |
| | | | | VTVSSGGGGSGGGGSGGGGSQTVVTQEPSLTV |
| | | | | SPGGTVTLTCGSSTGAVTSGNYPNWVQKKPGQ |
| | | | | APRGLIGGTKFLAPGTPARFSGSLLGGKAALTL |
| | | | | SGVQPEDEAEYYCVLWYSNRWVFGSGTKLTV |
| | | | | L |
| 314. | MS 15-B12 CC x | artificial | aa | QVQLQESGPGLVKPSETLSLTCTVSGGSISSSSY |
| | I2M2 xG4S3 x | | | FWGWIRQPPGKCLEWIGNIYYSGSSNYNPSLKS |
| | scFc x G4S3 - | | | RVTISVDTSKNQFSLKLSSVTAADTAVYYCAR |
| | CH3 24-D7CC x | | | LPRGDRDAFDIWGQGTMVTVSSGGGGSGGGG |
| | I2M2 - Full | | | SGGGGSDIVMTQSPSSLSASVGDRVTITCRASQ |
| | Sequence | | | GISNYLAWYQQKPGKVPKLLIYAASTLQSGVP |
| | | | | SRFSGSGSGTDFTLTISSLQPEDFATYYCQQSYS |
| | | | | TPFTFGCGTKVEIKSGGGGSEVQLVESGGGLV |
| | | | | QPGGSLKLSCAASGFTFNKYAINWVREAPGKG |
| | | | | LEWVARIRSKYNNYATYYADAVKDRFTISRDD |
| | | | | SKNTAYLQMNNLKTEDTAVYYCVRNANFGTS |
| | | | | YISYFAYWGQGTLVTVSSGGGGSGGGGSGGG |
| | | | | GSQTVVTQEPSLTVSPGGTVTLTCGSSTGAVTS |
| | | | | GNYPNWVQKKPGQAPRGLIGGTKFLAPGTPAR |
| | | | | FSGSLLGGKAALTLSGVQPEDEAEYYCVLWYS |
| | | | | NRWVFGSGTKLTVLGGGGSGGGGSGGGGSDK |
| | | | | THTCPPCPAPELLGGPSVFLFPPKPKDTLMISRT |
| | | | | PEVTCVVVDVSHEDPEVKFNWYVDGVEVHNA |
| | | | | KTKPCEEQYGSTYRCVSVLTVLHQDWLNGKE |
| | | | | YKCKVSNKALPAPIEKTISKAKGQPREPQVYTL |
| | | | | PPSREEMTKNQVSLTCLVKGFYPSDIAVEWES |
| | | | | NGQPENNYKTTPPVLDSDGSFFLYSKLTVDKS |
| | | | | RWQQGNVFSCSVMHEALHNHYTQKSLSLSPG |
| | | | | KGGGGSGGGGSGGGGSGGGGSGGGGSGGGGS |
| | | | | DKTHTCPPCPAPELLGGPSVFLFPPKPKDTLMIS |
| | | | | RTPEVTCVVVDVSHEDPEVKFNWYVDGVEVH |
| | | | | NAKTKPCEEQYGSTYRCVSVLTVLHQDWLNG |
| | | | | KEYKCKVSNKALPAPIEKTISKAKGQPREPQVY |
| | | | | TLPPSREEMTKNQVSLTCLVKGFYPSDIAVEWE |
| | | | | SNGQPENNYKTTPPVLDSDGSFFLYSKLTVDKS |
| | | | | RWQQGNVFSCSVMHEALHNHYTQKSLSLSPG |
| | | | | KGGGGSGGGGSGGGGSQVQLVQSGAEVKKPG |
| | | | | ASVKVSCKASGYTFTNYWMNWVRQAPGQCL |
| | | | | EWMGNIHSKAHGTNYNQKFQGRVTMTVDTSS |
| | | | | STAYMELSRLRSDDTAVYYCATRYFYVMDYW |
| | | | | GQGTLVTVSSGGGGSGGGGSGGGGSDIQMTQS |
| | | | | PSSLSASVGDRVTITCRASQDISNYLNWYQQKP |
| | | | | GKVPKLLIYYTSRLHSGVPSRFSGSGSGTDFTL |
| | | | | TISSLQPEDVATYYCVQYAQFPLTFGCGTKVEI |
| | | | | KSGGGGSEVQLVESGGGLVQPGGSLKLSCAAS |
| | | | | GFTFNKYAINWVREAPGKGLEWVARIRSKYN |
| | | | | NYATYYADAVKDRFTISRDDSKNTAYLQMNN |
| | | | | LKTEDTAVYYCVRNANFGTSYISYFAYWGQG |
| | | | | TLVTVSSGGGGSGGGGSGGGGSQTVVTQEPSL |
| | | | | TVSPGGTVTLTCGSSTGAVTSGNYPNWVQKKP |
| | | | | GQAPRGLIGGTKFLAPGTPARFSGSLLGGKAAL |
| | | | | TLSGVQPEDEAEYYCVLWYSNRWVFGSGTKL |
| | | | | TVL |
| 315. | MS 15-B12 CCx | artificial | aa | QVQLQESGPGLVKPSETLSLTCTVSGGSISSSSY |
| | I2C 44/100cc x | | | FWGWIRQPPGKCLEWIGNIYYSGSSNYNPSLKS |
| | scFc x CH3 15- | | | RVTISVDTSKNQFSLKLSSVTAADTAVYYCAR |
| | E11 CC x | | | LPRGDRDAFDIWGQGTMVTVSSGGGGSGGGG |
| | I2C4/100cc0 - | | | SGGGGSDIVMTQSPSSLSASVGDRVTITCRASQ |
| | Full Sequence | | | GISNYLAWYQQKPGKVPKLLIYAASTLQSGVP |
| | | | | SRFSGSGSGTDFTLTISSLQPEDFATYYCQQSYS |
| | | | | TPFTFGCGTKVEIKSGGGGSEVQLVESGGGLV |
| | | | | QPGGSLKLSCAASGFTFNKYAMNWVRQAPGK |
| | | | | CLEWVARIRSKYNNYATYYADSVKDRFTISRD |
| | | | | DSKNTAYLQMNNLKTEDTAVYYCVRHGNFGN |
| | | | | SYISYWAYWGQGTLVTVSSGGGGSGGGGSGG |
| | | | | GGSQTVVTQEPSLTVSPGGTVTLTCGSSTGAVT |
| | | | | SGNYPNWVQQKPGQAPRGLIGGTKFLAPGTPA |
| | | | | RFSGSLLGGKAALTLSGVQPEDEAEYYCVLWY |
| | | | | SNRWVFGCGTKLTVLGGGGSGGGGSGGGGSD |
| | | | | KTHTCPPCPAPELLGGPSVFLFPPKPKDTLMISR |
| | | | | TPEVTCVVVDVSHEDPEVKFNWYVDGVEVHN |
| | | | | AKTKPCEEQYGSTYRCVSVLTVLHQDWLNGK |
| | | | | EYKCKVSNKALPAPIEKTISKAKGQPREPQVYT |
| | | | | LPPSREEMTKNQVSLTCLVKGFYPSDIAVEWES |
| | | | | NGQPENNYKTTPPVLDSDGSFFLYSKLTVDKS |
| | | | | RWQQGNVFSCSVMHEALHNHYTQKSLSLSPG |
| | | | | KGGGGSGGGGSGGGGSGGGGSGGGGSGGGGS |
| | | | | DKTHTCPPCPAPELLGGPSVFLFPPKPKDTLMIS |
| | | | | RTPEVTCVVVDVSHEDPEVKFNWYVDGVEVH |
| | | | | NAKTKPCEEQYGSTYRCVSVLTVLHQDWLNG |
| | | | | KEYKCKVSNKALPAPIEKTISKAKGQPREPQVY |
| | | | | TLPPSREEMTKNQVSLTCLVKGFYPSDIAVEWE |
| | | | | SNGQPENNYKTTPPVLDSDGSFFLYSKLTVDKS |
| | | | | RWQQGNVFSCSVMHEALHNHYTQKSLSLSPG |
| | | | | KGGGGSGGGGSGGGGSQVQLVQSGAEVKKPG |
| | | | | ASVKVSCKASGYTFTNYWMNWVRQAPGQCL |
| | | | | EWMGNIAYGVKGTNYNQKFQGRVTMTVDTSS |
| | | | | STAYMELSRLRSDDTAVYYCATRYFYVMDYW |
| | | | | GQGTLVTVSSGGGGSGGGGSGGGGSDIQMTQS |
| | | | | PSSLSASVGDRVTITCRASQDISNYLNWYQQKP |
| | | | | GKVPKLLIYYTSRLHSGVPSRFSGSGSGTDFTL |
| | | | | TISSLQPEDVATYYCVQYAQFPLTFGCGTKVEI |
| | | | | KSGGGGSEVQLVESGGGLVQPGGSLKLSCAAS |
| | | | | GFTFNKYAMNWVRQAPGKCLEWVARIRSKYN |
| | | | | NYATYYADSVKDRFTISRDDSKNTAYLQMNN |
| | | | | LKTEDTAVYYCVRHGNFGNSYISYWAYWGQG |
| | | | | TLVTVSSGGGGSGGGGSGGGGSQTVVTQEPSL |
| | | | | TVSPGGTVTLTCGSSTGAVTSGNYPNWVQQKP |
| | | | | GQAPRGLIGGTKFLAPGTPARFSGSLLGGKAAL |
| | | | | TLSGVQPEDEAEYYCVLWYSNRWVFGCGTKL |
| | | | | TVL |
| 316. | MS 25-E3 CCx | artificial | aa | QVQLQESGPGLVKPSETLSLTCTVSGGSISSSSY |
| | 6H10.09x (G4)x | | | FWVWIRQPPGKCLEWIGSIYYSGSTYYNPSLKS |
| | scFcx (G4)x CH3 | | | RVTISVDTSKNQFSLKLNSVTAADTAVYYCAR |
| | 22-A12 CCx | | | LPRGDRMTFDIWGQGTMVTVSSGGGGSGGGG |
| | 6H10.09 - Full | | | SGGGGSEIVLTQSPGTLSLSPGERATLSCRASQS |
| | Sequence | | | VSSSYLAWYQQKPGQAPRLLIYGASSRATGIPD |
| | | | | RFSGSGSGTDFTLTISRLEPEDFAVYYCQQYGS |
| | | | | SPFTFGCGTKLEIKSGGGGSEVQLVESGGGLVQ |
| | | | | PGGSLKLSCAASGFTFNKYAMNWVRQAPGKG |
| | | | | MEWVARIRSKYNNYATYYADAVKDRFTISRD |
| | | | | DSKNTLYLQMNNLKTEDTAVYYCVRAGNFGS |
| | | | | SYISYFAYWGQGTLVTVSSGGGGSGGGGSGGG |
| | | | | GSQTVVTQEPSLTVSPGGTVTITCGSSTGAVTS |
| | | | | GNYPNWIQKKPGQAPRGLIGGTKFLAPGTPAR |
| | | | | FSGSLEGGKAALTLSGVQPEDEAEYYCVLYYS |
| | | | | NRWVFGSGTKLTVLGGGGDKTHTCPPCPAPEL |
| | | | | LGGPSVFLFPPKPKDTLMISRTPEVTCVVVDVS |
| | | | | HEDPEVKFNWYVDGVEVHNAKTKPCEEQYGS |
| | | | | TYRCVSVLTVLHQDWLNGKEYKCKVSNKALP |
| | | | | APIEKTISKAKGQPREPQVYTLPPSREEMTKNQ |
| | | | | VSLTCLVKGFYPSDIAVEWESNGQPENNYKTT |
| | | | | PPVLDSDGSFFLYSKLTVDKSRWQQGNVFSCS |
| | | | | VMHEALHNHYTQKSLSLSPGKGGGGSGGGGS |
| | | | | GGGGSGGGGSGGGGSGGGGSDKTHTCPPCPAP |
| | | | | ELLGGPSVFLFPPKPKDTLMISRTPEVTCVVVD |
| | | | | VSHEDPEVKFNWYVDGVEVHNAKTKPCEEQY |
| | | | | GSTYRCVSVLTVLHQDWLNGKEYKCKVSNKA |
| | | | | LPAPIEKTISKAKGQPREPQVYTLPPSREEMTK |
| | | | | NQVSLTCLVKGFYPSDIAVEWESNGQPENNYK |
| | | | | TTPPVLDSDGSFFLYSKLTVDKSRWQQGNVFS |
| | | | | CSVMHEALHNHYTQKSLSLSPGKGGGGQVQL |
| | | | | VQSGAEVVKPGASVKVSCKASGYTFTSSWMN |
| | | | | WVRQAPGQCLEWMGRIYTGTGETKYSGKFQG |
| | | | | RVTITRDTSASTAYMELSSLTSEDTAVYYCARQ |
| | | | | RDYGALYAMDYWGQGTLVTVSSGGGGSGGG |
| | | | | GSGGGGSDIQLTQSPSFLSASVGDRVTITCRAS |
| | | | | DDIYSYLAWYQQKPGKAPKLLVYNAKTLAEG |
| | | | | VPSRFSGSGSGTEFTLTISSLQPEDFATYYCQNH |
| | | | | DRTPFTFGCGTKVDIKSGGGGSEVQLVESGGG |
| | | | | LVQPGGSLKLSCAASGFTFNKYAMNWVRQAP |
| | | | | GKGMEWVARIRSKYNNYATYYADAVKDRFTI |
| | | | | SRDDSKNTLYLQMNNLKTEDTAVYYCVRAGN |
| | | | | FGSSYISYFAYWGQGTLVTVSSGGGGSGGGGS |
| | | | | GGGGSQTVVTQEPSLTVSPGGTVTITCGSSTGA |
| | | | | VTSGNYPNWIQKKPGQAPRGLIGGTKFLAPGT |
| | | | | PARFSGSLEGGKAALTLSGVQPEDEAEYYCVL |
| | | | | YYSNRWVFGSGTKLTVL |
| 317. | MS 25-E3 CCx | artificial | aa | QVQLQESGPGLVKPSETLSLTCTVSGGSISSSSY |
| | 6H10.09x | | | FWVWIRQPPGKCLEWIGSIYYSGSTYYNPSLKS |
| | (G4S)3x scFcx | | | RVTISVDTSKNQFSLKLNSVTAADTAVYYCAR |
| | (G4S)3x CH3 22- | | | LPRGDRMTFDIWGQGTMVTVSSGGGGSGGGG |
| | A12 CCx 6H10.09 - | | | SGGGGSEIVLTQSPGTLSLSPGERATLSCRASQS |
| | Full Sequence | | | VSSSYLAWYQQKPGQAPRLLIYGASSRATGIPD |
| | | | | RFSGSGSGTDFTLTISRLEPEDFAVYYCQQYGS |
| | | | | SPFTFGCGTKLEIKSGGGGSEVQLVESGGGLVQ |
| | | | | PGGSLKLSCAASGFTFNKYAMNWVRQAPGKG |
| | | | | MEWVARIRSKYNNYATYYADAVKDRFTISRD |
| | | | | DSKNTLYLQMNNLKTEDTAVYYCVRAGNFGS |
| | | | | SYISYFAYWGQGTLVTVSSGGGGSGGGGSGGG |
| | | | | GSQTVVTQEPSLTVSPGGTVTITCGSSTGAVTS |
| | | | | GNYPNWIQKKPGQAPRGLIGGTKFLAPGTPAR |
| | | | | FSGSLEGGKAALTLSGVQPEDEAEYYCVLYYS |
| | | | | NRWVFGSGTKLTVLGGGGSGGGGSGGGGSDK |
| | | | | THTCPPCPAPELLGGPSVFLFPPKPKDTLMISRT |
| | | | | PEVTCVVVDVSHEDPEVKFNWYVDGVEVHNA |
| | | | | KTKPCEEQYGSTYRCVSVLTVLHQDWLNGKE |
| | | | | YKCKVSNKALPAPIEKTISKAKGQPREPQVYTL |
| | | | | PPSREEMTKNQVSLTCLVKGFYPSDIAVEWES |
| | | | | NGQPENNYKTTPPVLDSDGSFFLYSKLTVDKS |
| | | | | RWQQGNVFSCSVMHEALHNHYTQKSLSLSPG |
| | | | | KGGGGSGGGGSGGGGSGGGGSGGGGSGGGGS |
| | | | | DKTHTCPPCPAPELLGGPSVFLFPPKPKDTLMIS |
| | | | | RTPEVTCVVVDVSHEDPEVKFNWYVDGVEVH |
| | | | | NAKTKPCEEQYGSTYRCVSVLTVLHQDWLNG |
| | | | | KEYKCKVSNKALPAPIEKTISKAKGQPREPQVY |
| | | | | TLPPSREEMTKNQVSLTCLVKGFYPSDIAVEWE |
| | | | | SNGQPENNYKTTPPVLDSDGSFFLYSKLTVDKS |
| | | | | RWQQGNVFSCSVMHEALHNHYTQKSLSLSPG |
| | | | | KGGGGSGGGGSGGGGSQVQLVQSGAEVVKPG |
| | | | | ASVKVSCKASGYTFTSSWMNWVRQAPGQCLE |
| | | | | WMGRIYTGTGETKYSGKFQGRVTITRDTSAST |
| | | | | AYMELSSLTSEDTAVYYCARQRDYGALYAMD |
| | | | | YWGQGTLVTVSSGGGGSGGGGSGGGGSDIQL |
| | | | | TQSPSFLSASVGDRVTITCRASDDIYSYLAWYQ |
| | | | | QKPGKAPKLLVYNAKTLAEGVPSRFSGSGSGT |
| | | | | EFTLTISSLQPEDFATYYCQNHDRTPFTFGCGT |
| | | | | KVDIKSGGGGSEVQLVESGGGLVQPGGSLKLS |
| | | | | CAASGFTFNKYAMNWVRQAPGKGMEWVARI |
| | | | | RSKYNNYATYYADAVKDRFTISRDDSKNTLYL |
| | | | | QMNNLKTEDTAVYYCVRAGNFGSSYISYFAY |
| | | | | WGQGTLVTVSSGGGGSGGGGSGGGGSQTVVT |
| | | | | QEPSLTVSPGGTVTITCGSSTGAVTSGNYPNWI |
| | | | | QKKPGQAPRGLIGGTKFLAPGTPARFSGSLEGG |
| | | | | KAALTLSGVQPEDEAEYYCVLYYSNRWVFGS |
| | | | | GTKLTVL |
| 318. | MS 46-A3 CC x | artificial | aa | QVQLVESGGGVVQPGRSLRLSCAASGFTFSSY |
| | I2Ccc(44/100)x | | | GMGWVRQAPGKCLEWVAVISYHGSNKYYAD |
| | (G4S)3x scFcx | | | AVKGRFTISRDNSKNTLYLQMNSLRAEDTAVY |
| | (G4S)3x CH3 | | | YCAREGAHFGSGSYYPLYYYYAMDVWGQGT |
| | 005-D5 CCx | | | TVTVSSGGGGSGGGGSGGGGSEIVTQSPGTLSL |
| | I2Ccc(44/100) - | | | SPGERATLSCRASQSVSSSYLAWYQQKPGQAP |
| | Full Sequence | | | RLLIYGASIRATGIPDRFSGSGSGTDFTLTISRLE |
| | | | | PEDFAVYYCQQTGSSPIFTFGCGTKVEIKSGGG |
| | | | | GSEVQLVESGGGLVQPGGSLKLSCAASGFTFN |
| | | | | KYAMNWVRQAPGKCLEWVARIRSKYNNYAT |
| | | | | YYADSVKDRFTISRDDSKNTAYLQMNNLKTED |
| | | | | TAVYYCVRHGNFGNSYISYWAYWGQGTLVTV |
| | | | | SSGGGGSGGGGSGGGGSQTVVTQEPSLTVSPG |
| | | | | GTVTLTCGSSTGAVTSGNYPNWVQQKPGQAP |
| | | | | RGLIGGTKFLAPGTPARFSGSLLGGKAALTLSG |
| | | | | VQPEDEAEYYCVLWYSNRWVFGCGTKLTVLG |
| | | | | GGGSGGGGSGGGGSDKTHTCPPCPAPELLGGP |
| | | | | SVFLFPPKPKDTLMISRTPEVTCVVVDVSHEDP |
| | | | | EVKFNWYVDGVEVHNAKTKPCEEQYGSTYRC |
| | | | | VSVLTVLHQDWLNGKEYKCKVSNKALPAPIEK |
| | | | | TISKAKGQPREPQVYTLPPSREEMTKNQVSLTC |
| | | | | LVKGFYPSDIAVEWESNGQPENNYKTTPPVLD |
| | | | | SDGSFFLYSKLTVDKSRWQQGNVFSCSVMHEA |
| | | | | LHNHYTQKSLSLSPGKGGGGSGGGGSGGGGS |
| | | | | GGGGSGGGGSGGGGSDKTHTCPPCPAPELLGG |
| | | | | PSVFLFPPKPKDTLMISRTPEVTCVVVDVSHED |
| | | | | PEVKFNWYVDGVEVHNAKTKPCEEQYGSTYR |
| | | | | CVSVLTVLHQDWLNGKEYKCKVSNKALPAPIE |
| | | | | KTISKAKGQPREPQVYTLPPSREEMTKNQVSLT |
| | | | | CLVKGFYPSDIAVEWESNGQPENNYKTTPPVL |
| | | | | DSDGSFFLYSKLTVDKSRWQQGNVFSCSVMHE |
| | | | | ALHNHYTQKSLSLSPGKGGGGSGGGGSGGGG |
| | | | | SEVQLLESGGGLVQPGGSLRLSCAASGFSFSSY |
| | | | | PINWVRQAPGKCLEWVGVIWTGGGTNYASSV |
| | | | | KGRFTISRDNSKNTVYLQMNSLRAEDTAVYYC |
| | | | | AKSRGVYDFKGRGAMDYWGQGTLVTVSSGG |
| | | | | GGSGGGGSGGGGSDIVMTQSPDSLAVSLGERA |
| | | | | TINCKSSQSLLYSSNQKNYFAWYQQKPGQPPK |
| | | | | LLIYWASTRESGVPDRFSGSGSGTDFTLTISSLQ |
| | | | | AEDVAVYYCQQYYSYPYTFGCGTKLEIKSGGG |
| | | | | GSEVQLVESGGGLVQPGGSLKLSCAASGFTFN |
| | | | | KYAMNWVRQAPGKCLEWVARIRSKYNNYAT |
| | | | | YYADSVKDRFTISRDDSKNTAYLQMNNLKTED |
| | | | | TAVYYCVRHGNFGNSYISYWAYWGQGTLVTV |
| | | | | SSGGGGSGGGGSGGGGSQTVVTQEPSLTVSPG |
| | | | | GTVTLTCGSSTGAVTSGNYPNWVQQKPGQAP |
| | | | | RGLIGGTKFLAPGTPARFSGSLLGGKAALTLSG |
| | | | | VQPEDEAEYYCVLWYSNRWVFGCGTKLTVL |
| 319. | MS R4L CC x | artificial | aa | QVQLVQSGAEVKKPGASVKVSCKASGYTFTG |
| | I2C 44/100cc x | | | YYIHWVRQAPGQCLEWMGWINPNSGGTNYA |
| | scFc x CH3 | | | QKFQGRVTMTRDTSISTAYMELSRLRSDDTAV |
| | R170R CC x | | | YYCARVEAVAGREYYYFSGMDVWGQGTTVT |
| | I2C4/100cc0 - | | | VSSGGGGSGGGGSGGGGSSYELTQPPSVSVSP |
| | Full Sequence | | | GQTASITCSGEKLGDKYVYWYQQKPGQSPVL |
| | | | | VIYQSTKRPSGVPERFSGSNSGNTATLTISGTQA |
| | | | | MDEADYYCQAYHASTAVFGCGTKLTVLSGGG |
| | | | | GSEVQLVESGGGLVQPGGSLKLSCAASGFTFN |
| | | | | KYAMNWVRQAPGKCLEWVARIRSKYNNYAT |
| | | | | YYADSVKDRFTISRDDSKNTAYLQMNNLKTED |
| | | | | TAVYYCVRHGNFGNSYISYWAYWGQGTLVTV |
| | | | | SSGGGGSGGGGSGGGGSQTVVTQEPSLTVSPG |
| | | | | GTVTLTCGSSTGAVTSGNYPNWVQQKPGQAP |
| | | | | RGLIGGTKFLAPGTPARFSGSLLGGKAALTLSG |
| | | | | VQPEDEAEYYCVLWYSNRWVFGCGTKLTVLG |
| | | | | GGGSGGGGSGGGGSDKTHTCPPCPAPELLGGP |
| | | | | SVFLFPPKPKDTLMISRTPEVTCVVVDVSHEDP |
| | | | | EVKFNWYVDGVEVHNAKTKPCEEQYGSTYRC |
| | | | | VSVLTVLHQDWLNGKEYKCKVSNKALPAPIEK |
| | | | | TISKAKGQPREPQVYTLPPSREEMTKNQVSLTC |
| | | | | LVKGFYPSDIAVEWESNGQPENNYKTTPPVLD |
| | | | | SDGSFFLYSKLTVDKSRWQQGNVFSCSVMHEA |
| | | | | LHNHYTQKSLSLSPGKGGGGSGGGGSGGGGS |
| | | | | GGGGSGGGGSGGGGSDKTHTCPPCPAPELLGG |
| | | | | PSVFLFPPKPKDTLMISRTPEVTCVVVDVSHED |
| | | | | PEVKFNWYVDGVEVHNAKTKPCEEQYGSTYR |
| | | | | CVSVLTVLHQDWLNGKEYKCKVSNKALPAPIE |
| | | | | KTISKAKGQPREPQVYTLPPSREEMTKNQVSLT |
| | | | | CLVKGFYPSDIAVEWESNGQPENNYKTTPPVL |
| | | | | DSDGSFFLYSKLTVDKSRWQQGNVFSCSVMHE |
| | | | | ALHNHYTQKSLSLSPGKGGGGSGGGGSGGGG |
| | | | | SEVQLLESGGGLVQPGGSLRLSCAASGFTFSSY |
| | | | | WMHWVRQTPGKCLEWVSKIDPSDDYTNYNQ |
| | | | | KVKGRFTISIDKSKNTLYLQMNSLRAEDTAVY |
| | | | | YCARWDYSHFDVWGQGTTVTVSSGGGGSGG |
| | | | | GGSGGGGSEIVMTQSPATLSVSPGERATLTCRA |
| | | | | SSSVSYMHWYQQKPGQAPRLLIYGTSNLVSGV |
| | | | | PARFSGSGSGTEFTLTISSLQSEDFAVYYCQQW |
| | | | | SSYPLTFGCGTKVEIKSGGGGSEVQLVESGGGL |
| | | | | VQPGGSLKLSCAASGFTFNKYAMNWVRQAPG |
| | | | | KCLEWVARIRSKYNNYATYYADSVKDRFTISR |
| | | | | DDSKNTAYLQMNNLKTEDTAVYYCVRHGNFG |
| | | | | NSYISYWAYWGQGTLVTVSSGGGGSGGGGSG |
| | | | | GGGSQTVVTQEPSLTVSPGGTVTLTCGSSTGA |
| | | | | VTSGNYPNWVQQKPGQAPRGLIGGTKFLAPGT |
| | | | | PARFSGSLLGGKAALTLSGVQPEDEAEYYCVL |
| | | | | WYSNRWVFGCGTKLTVL |
| 320. | MS R4L CC x | artificial | aa | QVQLVQSGAEVKKPGASVKVSCKASGYTFTG |
| | I2Ccc(44/100)x | | | YYIHWVRQAPGQCLEWMGWINPNSGGTNYA |
| | (G4S)3x scFcx | | | QKFQGRVTMTRDTSISTAYMELSRLRSDDTAV |
| | (G4S)3x CH3 08- | | | YYCARVEAVAGREYYYFSGMDVWGQGTTVT |
| | A11 CCx | | | VSSGGGGSGGGGSGGGGSSYELTQPPSVSVSP |
| | I2Ccc(44/100) - | | | GQTASITCSGEKLGDKYVYWYQQKPGQSPVL |
| | Full Sequence | | | VIYQSTKRPSGVPERFSGSNSGNTATLTISGTQA |
| | | | | MDEADYYCQAYHASTAVFGCGTKLTVLSGGG |
| | | | | GSEVQLVESGGGLVQPGGSLKLSCAASGFTFN |
| | | | | KYAMNWVRQAPGKCLEWVARIRSKYNNYAT |
| | | | | YYADSVKDRFTISRDDSKNTAYLQMNNLKTED |
| | | | | TAVYYCVRHGNFGNSYISYWAYWGQGTLVTV |
| | | | | SSGGGGSGGGGSGGGGSQTVVTQEPSLTVSPG |
| | | | | GTVTLTCGSSTGAVTSGNYPNWVQQKPGQAP |
| | | | | RGLIGGTKFLAPGTPARFSGSLLGGKAALTLSG |
| | | | | VQPEDEAEYYCVLWYSNRWVFGCGTKLTVLG |
| | | | | GGGSGGGGSGGGGSDKTHTCPPCPAPELLGGP |
| | | | | SVFLFPPKPKDTLMISRTPEVTCVVVDVSHEDP |
| | | | | EVKFNWYVDGVEVHNAKTKPCEEQYGSTYRC |
| | | | | VSVLTVLHQDWLNGKEYKCKVSNKALPAPIEK |
| | | | | TISKAKGQPREPQVYTLPPSREEMTKNQVSLTC |
| | | | | LVKGFYPSDIAVEWESNGQPENNYKTTPPVLD |
| | | | | SDGSFFLYSKLTVDKSRWQQGNVFSCSVMHEA |
| | | | | LHNHYTQKSLSLSPGKGGGGSGGGGSGGGGS |
| | | | | GGGGSGGGGSGGGGSDKTHTCPPCPAPELLGG |
| | | | | PSVFLFPPKPKDTLMISRTPEVTCVVVDVSHED |
| | | | | PEVKFNWYVDGVEVHNAKTKPCEEQYGSTYR |
| | | | | CVSVLTVLHQDWLNGKEYKCKVSNKALPAPIE |
| | | | | KTISKAKGQPREPQVYTLPPSREEMTKNQVSLT |
| | | | | CLVKGFYPSDIAVEWESNGQPENNYKTTPPVL |
| | | | | DSDGSFFLYSKLTVDKSRWQQGNVFSCSVMHE |
| | | | | ALHNHYTQKSLSLSPGKGGGGSGGGGSGGGG |
| | | | | SEVQLLESGGGLVQPGGSLRLSCAASGFTFSSY |
| | | | | WMHWVRQTPGKCLEWVSKIDPSDDYTNYNQ |
| | | | | KVKGRFTISIDKSKNTLYLQMNSLRAEDTAVY |
| | | | | YCARWDYNYFDVWGQGTTVTVSSGGGGSGG |
| | | | | GGSGGGGSEIVMTQSPATLSVSPGERATLTCRA |
| | | | | SSSVSYMHWYQQKPGQAPRLLIYGTSNLVSGV |
| | | | | PARFSGSGSGTEFTLTISSLQSEDFAVYYCQQW |
| | | | | SSYPLTFGCGTKVEIKSGGGGSEVQLVESGGGL |
| | | | | VQPGGSLKLSCAASGFTFNKYAMNWVRQAPG |
| | | | | KCLEWVARIRSKYNNYATYYADSVKDRFTISR |
| | | | | DDSKNTAYLQMNNLKTEDTAVYYCVRHGNFG |
| | | | | NSYISYWAYWGQGTLVTVSSGGGGSGGGGSG |
| | | | | GGGSQTVVTQEPSLTVSPGGTVTLTCGSSTGA |
| | | | | VTSGNYPNWVQQKPGQAPRGLIGGTKFLAPGT |
| | | | | PARFSGSLLGGKAALTLSGVQPEDEAEYYCVL |
| | | | | WYSNRWVFGCGTKLTVL |
| 321. | MS R4L CC x | artificial | Aa | QVQLVQSGAEVKKPGASVKVSCKASGYTFTG |
| | I2Ccc(44/100)x | | | YYIHWVRQAPGQCLEWMGWINPNSGGTNYA |
| | (G4S)3x scFcx | | | QKFQGRVTMTRDTSISTAYMELSRLRSDDTAV |
| | (G4S)3x CH3 | | | YYCARVEAVAGREYYYFSGMDVWGQGTTVT |
| | R164L CCx | | | VSSGGGGSGGGGSGGGGSSYELTQPPSVSVSP |
| | I2Ccc(44/100) - | | | GQTASITCSGEKLGDKYVYWYQQKPGQSPVL |
| | Full Sequence | | | VIYQSTKRPSGVPERFSGSNSGNTATLTISGTQA |
| | | | | MDEADYYCQAYHASTAVFGCGTKLTVLSGGG |
| | | | | GSEVQLVESGGGLVQPGGSLKLSCAASGFTFN |
| | | | | KYAMNWVRQAPGKCLEWVARIRSKYNNYAT |
| | | | | YYADSVKDRFTISRDDSKNTAYLQMNNLKTED |
| | | | | TAVYYCVRHGNFGNSYISYWAYWGQGTLVTV |
| | | | | SSGGGGSGGGGSGGGGSQTVVTQEPSLTVSPG |
| | | | | GTVTLTCGSSTGAVTSGNYPNWVQQKPGQAP |
| | | | | RGLIGGTKFLAPGTPARFSGSLLGGKAALTLSG |
| | | | | VQPEDEAEYYCVLWYSNRWVFGCGTKLTVLG |
| | | | | GGGSGGGGSGGGGSDKTHTCPPCPAPELLGGP |
| | | | | SVFLFPPKPKDTLMISRTPEVTCVVVDVSHEDP |
| | | | | EVKFNWYVDGVEVHNAKTKPCEEQYGSTYRC |
| | | | | VSVLTVLHQDWLNGKEYKCKVSNKALPAPIEK |
| | | | | TISKAKGQPREPQVYTLPPSREEMTKNQVSLTC |
| | | | | LVKGFYPSDIAVEWESNGQPENNYKTTPPVLD |
| | | | | SDGSFFLYSKLTVDKSRWQQGNVFSCSVMHEA |
| | | | | LHNHYTQKSLSLSPGKGGGGSGGGGSGGGGS |
| | | | | GGGGSGGGGSGGGGSDKTHTCPPCPAPELLGG |
| | | | | PSVFLFPPKPKDTLMISRTPEVTCVVVDVSHED |
| | | | | PEVKFNWYVDGVEVHNAKTKPCEEQYGSTYR |
| | | | | CVSVLTVLHQDWLNGKEYKCKVSNKALPAPIE |
| | | | | KTISKAKGQPREPQVYTLPPSREEMTKNQVSLT |
| | | | | CLVKGFYPSDIAVEWESNGQPENNYKTTPPVL |
| | | | | DSDGSFFLYSKLTVDKSRWQQGNVFSCSVMHE |
| | | | | ALHNHYTQKSLSLSPGKGGGGSGGGGSGGGG |
| | | | | SEVQLLESGGGLVQPGGSVRLSCAASGFTFSSY |
| | | | | WMYWVRQAPGKCLEWVSKIDPSDDYTNYNQ |
| | | | | KVKGRFTISIDNSKNTLYLQMNSLRAEDSAVY |
| | | | | YCARWDYTHFDVWGQGTTVTVSSGGGGSGG |
| | | | | GGSGGGGSEIVMTQSPATLSVSPGERATLSCRA |
| | | | | SSSVSYMHWYQQKPGQAPRLLIYGTSNLASGV |
| | | | | PVRFSGSGSGTEFTLTISRLQSEDVAVYYCQQW |
| | | | | SSYPLTFGCGTKVEIKSGGGGSEVQLVESGGGL |
| | | | | VQPGGSLKLSCAASGFTFNKYAMNWVRQAPG |
| | | | | KCLEWVARIRSKYNNYATYYADSVKDRFTISR |
| | | | | DDSKNTAYLQMNNLKTEDTAVYYCVRHGNFG |
| | | | | NSYISYWAYWGQGTLVTVSSGGGGSGGGGSG |
| | | | | GGGSQTVVTQEPSLTVSPGGTVTLTCGSSTGA |
| | | | | VTSGNYPNWVQQKPGQAPRGLIGGTKFLAPGT |
| | | | | PARFSGSLLGGKAALTLSGVQPEDEAEYYCVL |
| | | | | WYSNRWVFGCGTKLTVL |
| 322. | MS R4L CCx | artificial | Aa | QVQLVQSGAEVKKPGASVKVSCKASGYTFTG |
| | I2Ccc(44/100)x | | | YYIHWVRQAPGQCLEWMGWINPNSGGTNYA |
| | (G4)x scFc x (G4) | | | QKFQGRVTMTRDTSISTAYMELSRLRSDDTAV |
| | x CH3 08-A11 | | | YYCARVEAVAGREYYYFSGMDVWGQGTTVT |
| | CCx | | | VSSGGGGSGGGGSGGGGSSYELTQPPSVSVSP |
| | I2Ccc(44/100) - | | | GQTASITCSGEKLGDKYVYWYQQKPGQSPVL |
| | Full Sequence | | | VIYQSTKRPSGVPERFSGSNSGNTATLTISGTQA |
| | | | | MDEADYYCQAYHASTAVFGCGTKLTVLSGGG |
| | | | | GSEVQLVESGGGLVQPGGSLKLSCAASGFTFN |
| | | | | KYAMNWVRQAPGKCLEWVARIRSKYNNYAT |
| | | | | YYADSVKDRFTISRDDSKNTAYLQMNNLKTED |
| | | | | TAVYYCVRHGNFGNSYISYWAYWGQGTLVTV |
| | | | | SSGGGGSGGGGSGGGGSQTVVTQEPSLTVSPG |
| | | | | GTVTLTCGSSTGAVTSGNYPNWVQQKPGQAP |
| | | | | RGLIGGTKFLAPGTPARFSGSLLGGKAALTLSG |
| | | | | VQPEDEAEYYCVLWYSNRWVFGCGTKLTVLG |
| | | | | GGGDKTHTCPPCPAPELLGGPSVFLFPPKPKDT |
| | | | | LMISRTPEVTCVVVDVSHEDPEVKFNWYVDG |
| | | | | VEVHNAKTKPCEEQYGSTYRCVSVLTVLHQD |
| | | | | WLNGKEYKCKVSNKALPAPIEKTISKAKGQPR |
| | | | | EPQVYTLPPSREEMTKNQVSLTCLVKGFYPSDI |
| | | | | AVEWESNGQPENNYKTTPPVLDSDGSFFLYSK |
| | | | | LTVDKSRWQQGNVFSCSVMHEALHNHYTQKS |
| | | | | LSLSPGKGGGGSGGGGSGGGGSGGGGSGGGG |
| | | | | SGGGGSDKTHTCPPCPAPELLGGPSVFLFPPKP |
| | | | | KDTLMISRTPEVTCVVVDVSHEDPEVKFNWYV |
| | | | | DGVEVHNAKTKPCEEQYGSTYRCVSVLTVLH |
| | | | | QDWLNGKEYKCKVSNKALPAPIEKTISKAKGQ |
| | | | | PREPQVYTLPPSREEMTKNQVSLTCLVKGFYPS |
| | | | | DIAVEWESNGQPENNYKTTPPVLDSDGSFFLYS |
| | | | | KLTVDKSRWQQGNVFSCSVMHEALHNHYTQK |
| | | | | SLSLSPGKGGGGEVQLLESGGGLVQPGGSLRLS |
| | | | | CAASGFTFSSYWMHWVRQTPGKCLEWVSKID |
| | | | | PSDDYTNYNQKVKGRFTISIDKSKNTLYLQMN |
| | | | | SLRAEDTAVYYCARWDYNYFDVWGQGTTVT |
| | | | | VSSGGGGSGGGGSGGGGSEIVMTQSPATLSVS |
| | | | | PGERATLTCRASSSVSYMHWYQQKPGQAPRLL |
| | | | | IYGTSNLVSGVPARFSGSGSGTEFTLTISSLQSE |
| | | | | DFAVYYCQQWSSYPLTFGCGTKVEIKSGGGGS |
| | | | | EVQLVESGGGLVQPGGSLKLSCAASGFTFNKY |
| | | | | AMNWVRQAPGKCLEWVARIRSKYNNYATYY |
| | | | | ADSVKDRFTISRDDSKNTAYLQMNNLKTEDTA |
| | | | | VYYCVRHGNFGNSYISYWAYWGQGTLVTVSS |
| | | | | GGGGSGGGGSGGGGSQTVVTQEPSLTVSPGGT |
| | | | | VTLTCGSSTGAVTSGNYPNWVQQKPGQAPRG |
| | | | | LIGGTKFLAPGTPARFSGSLLGGKAALTLSGVQ |
| | | | | PEDEAEYYCVLWYSNRWVFGCGTKLTVL |
| 323. | MS15-B12 CC x | artificial | Aa | QVQLQESGPGLVKPSETLSLTCTVSGGSISSSSY |
| | I2M2 x (G4Q)3x | | | FWGWIRQPPGKCLEWIGNIYYSGSSNYNPSLKS |
| | scFcmod x | | | RVTISVDTSKNQFSLKLSSVTAADTAVYYCAR |
| | (G4Q)3 x CH3 24- | | | LPRGDRDAFDIWGQGTMVTVSSGGGGQGGGG |
| | D7 CC x I2M2 - | | | QGGGGQDIVMTQSPSSLSASVGDRVTITCRASQ |
| | Full Sequence | | | GISNYLAWYQQKPGKVPKLLIYAASTLQSGVP |
| | | | | SRFSGSGSGTDFTLTISSLQPEDFATYYCQQSYS |
| | | | | TPFTFGCGTKVEIKSGGGGQEVQLVESGGGLV |
| | | | | QPGGSLKLSCAASGFTFNKYAINWVREAPGKG |
| | | | | LEWVARIRSKYNNYATYYADAVKDRFTISRDD |
| | | | | SKNTAYLQMNNLKTEDTAVYYCVRNANFGTS |
| | | | | YISYFAYWGQGTLVTVSSGGGGQGGGGQGGG |
| | | | | GQQTVVTQEPSLTVSPGGTVTLTCGSSTGAVTS |
| | | | | GNYPNWVQKKPGQAPRGLIGGTKFLAPGTPAR |
| | | | | FSGSLLGGKAALTLSGVQPEDEAEYYCVLWYS |
| | | | | NRWVFGSGTKLTVLGGGGQGGGGQGGGGQC |
| | | | | PPCPAPELLGGPSVFLFPPKPKDTLMISRTPEVT |
| | | | | CVVVDVSHEEPEVKFNWYVDGVEVHNAKTKP |
| | | | | CEEQYGSTYRCVSVLTVLHQDWLNGKEYKCK |
| | | | | VSNKALPAPIEKTISKAKGQPREPQVYTLPPSRE |
| | | | | EMTKNQVSLTCLVKGFYPSDIAVEWESNGQPE |
| | | | | NNYKTTPPVLDSDGSFFLYSKLTVDKSRWQQG |
| | | | | NVFSCSVMHEALHNHYTQKSLSLSPGKGGGG |
| | | | | QGGGGQGGGGQGGGGQGGGGQGGGGQCPPC |
| | | | | PAPELLGGPSVFLFPPKPKDTLMISRTPEVTCVV |
| | | | | VDVSHEEPEVKFNWYVDGVEVHNAKTKPCEE |
| | | | | QYGSTYRCVSVLTVLHQDWLNGKEYKCKVSN |
| | | | | KALPAPIEKTISKAKGQPREPQVYTLPPSREEM |
| | | | | TKNQVSLTCLVKGFYPSDIAVEWESNGQPENN |
| | | | | YKTTPPVLDSDGSFFLYSKLTVDKSRWQQGNV |
| | | | | FSCSVMHEALHNHYTQKSLSLSPGKGGGGQG |
| | | | | GGGQGGGGQQVQLVQSGAEVKKPGASVKVSC |
| | | | | KASGYTFTNYWMNWVRQAPGQCLEWMGNIH |
| | | | | SKAHGTNYNQKFQGRVTMTVDTSSSTAYMEL |
| | | | | SRLRSDDTAVYYCATRYFYVMDYWGQGTLVT |
| | | | | VSSGGGGQGGGGQGGGGQDIQMTQSPSSLSAS |
| | | | | VGDRVTITCRASQDISNYLNWYQQKPGKVPKL |
| | | | | LIYYTSRLHSGVPSRFSGSGSGTDFTLTISSLQPE |
| | | | | DVATYYCVQYAQFPLTFGCGTKVEIKSGGGGQ |
| | | | | EVQLVESGGGLVQPGGSLKLSCAASGFTFNKY |
| | | | | AINWVREAPGKGLEWVARIRSKYNNYATYYA |
| | | | | DAVKDRFTISRDDSKNTAYLQMNNLKTEDTA |
| | | | | VYYCVRNANFGTSYISYFAYWGQGTLVTVSSG |
| | | | | GGGQGGGGQGGGGQQTVVTQEPSLTVSPGGT |
| | | | | VTLTCGSSTGAVTSGNYPNWVQKKPGQAPRG |
| | | | | LIGGTKFLAPGTPARFSGSLLGGKAALTLSGVQ |
| | | | | PEDEAEYYCVLWYSNRWVFGSGTKLTVL |
| 324. | heFc(A) x(G4)x | artificial | Aa | DKTHTCPPCPAPELLGGPSVFLFPPKPKDTLMIS |
| | MS 15-B12 CCx | | | RTPEVTCVVVDVSHEDPEVKFNWYVDGVEVH |
| | 6H10.09 | | | NAKTKPCEEQYGSTYRCVSVLTVLHQDWLNG |
| | | | | KEYKCKVSNKALPAPIEKTISKAKGQPREPQVY |
| | | | | TLPPSREEMTKNQVSLTCLVKGFYPSDIAVEWE |
| | | | | SNGQPENNYDTTPPVLDSDGSFFLYSDLTVDKS |
| | | | | RWQQGNVFSCSVMHEALHNHYTQDSLSLSPG |
| | | | | KGGGGQVQLQESGPGLVKPSETLSLTCTVSGG |
| | | | | SISSSSYFWGWIRQPPGKCLEWIGNIYYSGSSN |
| | | | | YNPSLKSRVTISVDTSKNQFSLKLSSVTAADTA |
| | | | | VYYCARLPRGDRDAFDIWGQGTMVTVSSGGG |
| | | | | GSGGGGSGGGGSDIVMTQSPSSLSASVGDRVTI |
| | | | | TCRASQGISNYLAWYQQKPGKVPKLLIYAAST |
| | | | | LQSGVPSRFSGSGSGTDFTLTISSLQPEDFATYY |
| | | | | CQQSYSTPFTFGCGTKVEIKSGGGGSEVQLVES |
| | | | | GGGLVQPGGSLKLSCAASGFTFNKYAMNWVR |
| | | | | QAPGKGMEWVARIRSKYNNYATYYADAVKD |
| | | | | RFTISRDDSKNTLYLQMNNLKTEDTAVYYCVR |
| | | | | AGNFGSSYISYFAYWGQGTLVTVSSGGGGSGG |
| | | | | GGSGGGGSQTVVTQEPSLTVSPGGTVTITCGSS |
| | | | | TGAVTSGNYPNWIQKKPGQAPRGLIGGTKFLA |
| | | | | PGTPARFSGSLEGGKAALTLSGVQPEDEAEYY |
| | | | | CVLYYSNRWVFGSGTKLTVL |
| 325. | CH3 15-E11 CC | artificial | Aa | QVQLVQSGAEVKKPGASVKVSCKASGYTFTN |
| | 6H10.09 x (G4)x | | | YWMNWVRQAPGQCLEWMGNIAYGVKGTNY |
| | heFc(B) | | | NQKFQGRVTMTVDTSSSTAYMELSRLRSDDTA |
| | | | | VYYCATRYFYVMDYWGQGTLVTVSSGGGGS |
| | | | | GGGGSGGGGSDIQMTQSPSSLSASVGDRVTITC |
| | | | | RASQDISNYLNWYQQKPGKVPKLLIYYTSRLH |
| | | | | SGVPSRFSGSGSGTDFTLTISSLQPEDVATYYCV |
| | | | | QYAQFPLTFGCGTKVEIKSGGGGSEVQLVESG |
| | | | | GGLVQPGGSLKLSCAASGFTFNKYAMNWVRQ |
| | | | | APGKGMEWVARIRSKYNNYATYYADAVKDR |
| | | | | FTISRDDSKNTLYLQMNNLKTEDTAVYYCVRA |
| | | | | GNFGSSYISYFAYWGQGTLVTVSSGGGGSGGG |
| | | | | GSGGGGSQTVVTQEPSLTVSPGGTVTITCGSST |
| | | | | GAVTSGNYPNWIQKKPGQAPRGLIGGTKFLAP |
| | | | | GTPARFSGSLEGGKAALTLSGVQPEDEAEYYC |
| | | | | VLYYSNRWVFGSGTKLTVLGGGGDKTHTCPP |
| | | | | CPAPELLGGPSVFLFPPKPKDTLMISRTPEVTCV |
| | | | | VVDVSHEDPEVKFNWYVDGVEVHNAKTKPCE |
| | | | | EQYGSTYRCVSVLTVLHQDWLNGKEYKCKVS |
| | | | | NKALPAPIEKTISKAKGQPREPQVYTLPPSRKE |
| | | | | MTKNQVSLTCLVKGFYPSDIAVEWESNGQPEN |
| | | | | NYKTTPPVLKSDGSFFLYSKLTVDKSRWQQGN |
| | | | | VFSCSVMHEALHNHYTQKSLSLSPGK |
| 326. | heFc(B) x (G4)x | artificial | Aa | DKTHTCPPCPAPELLGGPSVFLFPPKPKDTLMIS |
| | CH3 15-E11 CCx | | | RTPEVTCVVVDVSHEDPEVKFNWYVDGVEVH |
| | 6H10.09 | | | NAKTKPCEEQYGSTYRCVSVLTVLHQDWLNG |
| | | | | KEYKCKVSNKALPAPIEKTISKAKGQPREPQVY |
| | | | | TLPPSRKEMTKNQVSLTCLVKGFYPSDIAVEW |
| | | | | ESNGQPENNYKTTPPVLKSDGSFFLYSKLTVDK |
| | | | | SRWQQGNVFSCSVMHEALHNHYTQKSLSLSP |
| | | | | GKGGGGQVQLVQSGAEVKKPGASVKVSCKAS |
| | | | | GYTFTNYWMNWVRQAPGQCLEWMGNIAYGV |
| | | | | KGTNYNQKFQGRVTMTVDTSSSTAYMELSRL |
| | | | | RSDDTAVYYCATRYFYVMDYWGQGTLVTVSS |
| | | | | GGGGSGGGGSGGGGSDIQMTQSPSSLSASVGD |
| | | | | RVTITCRASQDISNYLNWYQQKPGKVPKLLIY |
| | | | | YTSRLHSGVPSRFSGSGSGTDFTLTISSLQPEDV |
| | | | | ATYYCVQYAQFPLTFGCGTKVEIKSGGGGSEV |
| | | | | QLVESGGGLVQPGGSLKLSCAASGFTFNKYAM |
| | | | | NWVRQAPGKGMEWVARIRSKYNNYATYYAD |
| | | | | AVKDRFTISRDDSKNTLYLQMNNLKTEDTAVY |
| | | | | YCVRAGNFGSSYISYFAYWGQGTLVTVSSGGG |
| | | | | GSGGGGSGGGGSQTVVTQEPSLTVSPGGTVTIT |
| | | | | CGSSTGAVTSGNYPNWIQKKPGQAPRGLIGGT |
| | | | | KFLAPGTPARFSGSLEGGKAALTLSGVQPEDEA |
| | | | | EYYCVLYYSNRWVFGSGTKLTVL |
| 327. | MS 15-B12 CCx | artificial | Aa | QVQLQESGPGLVKPSETLSLTCTVSGGSISSSSY |
| | 6H10.09x (G4)x | | | FWGWIRQPPGKCLEWIGNIYYSGSSNYNPSLKS |
| | heFc(A) | | | RVTISVDTSKNQFSLKLSSVTAADTAVYYCAR |
| | | | | LPRGDRDAFDIWGQGTMVTVSSGGGGSGGGG |
| | | | | SGGGGSDIVMTQSPSSLSASVGDRVTITCRASQ |
| | | | | GISNYLAWYQQKPGKVPKLLIYAASTLQSGVP |
| | | | | SRFSGSGSGTDFTLTISSLQPEDFATYYCQQSYS |
| | | | | TPFTFGCGTKVEIKSGGGGSEVQLVESGGGLV |
| | | | | QPGGSLKLSCAASGFTFNKYAMNWVRQAPGK |
| | | | | GMEWVARIRSKYNNYATYYADAVKDRFTISR |
| | | | | DDSKNTLYLQMNNLKTEDTAVYYCVRAGNFG |
| | | | | SSYISYFAYWGQGTLVTVSSGGGGSGGGGSGG |
| | | | | GGSQTVVTQEPSLTVSPGGTVTITCGSSTGAVT |
| | | | | SGNYPNWIQKKPGQAPRGLIGGTKFLAPGTPA |
| | | | | RFSGSLEGGKAALTLSGVQPEDEAEYYCVLYY |
| | | | | SNRWVFGSGTKLTVLGGGGDKTHTCPPCPAPE |
| | | | | LLGGPSVFLFPPKPKDTLMISRTPEVTCVVVDV |
| | | | | SHEDPEVKFNWYVDGVEVHNAKTKPCEEQYG |
| | | | | STYRCVSVLTVLHQDWLNGKEYKCKVSNKAL |
| | | | | PAPIEKTISKAKGQPREPQVYTLPPSREEMTKN |
| | | | | QVSLTCLVKGFYPSDIAVEWESNGQPENNYDT |
| | | | | TPPVLDSDGSFFLYSDLTVDKSRWQQGNVFSC |
| | | | | SVMHEALHNHYTQDSLSLSPGK |
| 328. | H MS 15-B12 x H | artificial | Aa | QVQLQESGPGLVKPSETLSLTCTVSGGSISSSSY |
| | 6H10.09 x (G4S)3 | | | FWGWIRQPPGKCLEWIGNIYYSGSSNYNPSLKS |
| | x heFc(A) x | | | RVTISVDTSKNQFSLKLSSVTAADTAVYYCAR |
| | (G4S)3 x H CH3 | | | LPRGDRDAFDIWGQGTMVTVSSGGGGSGGGG |
| | 15-E11 x H | | | SGGGGSGGGGSEVQLVESGGGLVQPGGSLKLS |
| | 6H10.09 | | | CAASGFTFNKYAMNWVRQAPGKGMEWVARI |
| | | | | RSKYNNYATYYADAVKDRFTISRDDSKNTLYL |
| | | | | QMNNLKTEDTAVYYCVRAGNFGSSYISYFAY |
| | | | | WGQGTLVTVSSGGGGSGGGGSGGGGSDKTHT |
| | | | | CPPCPAPELLGGPSVFLFPPKPKDTLMISRTPEV |
| | | | | TCVVVDVSHEDPEVKFNWYVDGVEVHNAKT |
| | | | | KPCEEQYGSTYRCVSVLTVLHQDWLNGKEYK |
| | | | | CKVSNKALPAPIEKTISKAKGQPREPQVYTLPP |
| | | | | SREEMTKNQVSLTCLVKGFYPSDIAVEWESNG |
| | | | | QPENNYDTTPPVLDSDGSFFLYSDLTVDKSRW |
| | | | | QQGNVFSCSVMHEALHNHYTQDSLSLSPGKG |
| | | | | GGGSGGGGSGGGGSQVQLVQSGAEVKKPGAS |
| | | | | VKVSCKASGYTFTNYWMNWVRQAPGQCLEW |
| | | | | MGNIAYGVKGTNYNQKFQGRVTMTVDTSSST |
| | | | | AYMELSRLRSDDTAVYYCATRYFYVMDYWG |
| | | | | QGTLVTVSSGGGGSGGGGSGGGGSGGGGSEV |
| | | | | QLVESGGGLVQPGGSLKLSCAASGFTFNKYAM |
| | | | | NWVRQAPGKGMEWVARIRSKYNNYATYYAD |
| | | | | AVKDRFTISRDDSKNTLYLQMNNLKTEDTAVY |
| | | | | YCVRAGNFGSSYISYFAYWGQGTLVTVSS |
| 329. | L MS 15-B12 x L | artificial | Aa | DIVMTQSPSSLSASVGDRVTITCRASQGISNYL |
| | 6H10.09 x (G4S)3 | | | AWYQQKPGKVPKLLIYAASTLQSGVPSRFSGS |
| | x heFc(B) x | | | GSGTDFTLTISSLQPEDFATYYCQQSYSTPFTFG |
| | (G4S)3 x L CH3 | | | CGTKVEIKSGGGGSGGGGSGGGGSGGGGSQT |
| | 15-E11 x L | | | VVTQEPSLTVSPGGTVTITCGSSTGAVTSGNYP |
| | 6H10.09 | | | NWIQKKPGQAPRGLIGGTKFLAPGTPARFSGSL |
| | | | | EGGKAALTLSGVQPEDEAEYYCVLYYSNRWV |
| | | | | FGSGTKLTVLGGGGSGGGGSGGGGSDKTHTCP |
| | | | | PCPAPELLGGPSVFLFPPKPKDTLMISRTPEVTC |
| | | | | VVVDVSHEDPEVKFNWYVDGVEVHNAKTKPC |
| | | | | EEQYGSTYRCVSVLTVLHQDWLNGKEYKCKV |
| | | | | SNKALPAPIEKTISKAKGQPREPQVYTLPPSRKE |
| | | | | MTKNQVSLTCLVKGFYPSDIAVEWESNGQPEN |
| | | | | NYKTTPPVLKSDGSFFLYSKLTVDKSRWQQGN |
| | | | | VFSCSVMHEALHNHYTQKSLSLSPGKGGGGSG |
| | | | | GGGSGGGGSDIQMTQSPSSLSASVGDRVTITCR |
| | | | | ASQDISNYLNWYQQKPGKVPKLLIYYTSRLHS |
| | | | | GVPSRFSGSGSGTDFTLTISSLQPEDVATYYCV |
| | | | | QYAQFPLTFGCGTKVEIKSGGGGSGGGGSGGG |
| | | | | GSGGGGSQTVVTQEPSLTVSPGGTVTITCGSST |
| | | | | GAVTSGNYPNWIQKKPGQAPRGLIGGTKFLAP |
| | | | | GTPARFSGSLEGGKAALTLSGVQPEDEAEYYC |
| | | | | VLYYSNRWVFGSGTKLTVL |
| 330. | IgG1 subtype | artificial | aa | DKTHTCPPCP |
| | hinge | | | |
| 331. | IgG2 subtype | artificial | aa | ERKCCVECPPCP |
| | hinge | | | |
| 332. | IgG3 subtype | artificial | aa | ELKTPLDTTHTCPRCP |
| | hinge | | | |
| 333. | IgG3 subtype | artificial | aa | ELKTPLGDTTHTCPRCP |
| | hinge | | | |
| 334. | EpCAM 5-10 LH - | artificial | aa | NYWLG |
| | HCDR1 | | | |
| 335. | EpCAM 5-10 LH - | artificial | aa | DIFPGSGNIHYNEKFKG |
| | HCDR2 | | | |
| 336. | EpCAM 5-10 LH - | artificial | aa | LRNWDEPMDY |
| | HCDR3 | | | |
| 337. | EpCAM 5-10 LH - | artificial | aa | KSSQSLLNSGNQKNYLT |
| | LCDR1 | | | |
| 338. | EpCAM 5-10 LH - | artificial | Aa | WASTRES |
| | LCDR2 | | | |
| 339. | EpCAM 5-10 LH - | artificial | Aa | QNDYSYPLT |
| | LCDR3 | | | |
| 340. | EpCAM 5-10 LH - | artificial | Aa | EVQLLEQSGAELVRPGTSVKISCKASGYAFTNY |
| | VH | | | WLGWVKQRPGHGLEWIGDIFPGSGNIHYNEKF |
| | | | | KGKATLTADKSSSTAYMQLSSLTFEDSAVYFC |
| | | | | ARLRNWDEPMDYWGQGTTVTVSS |
| 341. | EpCAM 5-10 LH - | artificial | Aa | ELVMTQSPSSLTVTAGEKVTMSCKSSQSLLNS |
| | VL | | | GNQKNYLTWYQQKPGQPPKLLIYWASTRESG |
| | | | | VPDRFTGSGSGTDFTLTISSVQAEDLAVYYCQN |
| | | | | DYSYPLTFGAGTKLEIK |
| 342. | EPCAM 5-10 x | artificial | Aa | ELVMTQSPSSLTVTAGEKVTMSCKSSQSLLNS |
| | scFc x H2 x I2Ccc | | | GNQKNYLTWYQQKPGQPPKLLIYWASTRESG |
| | x I2Ccc - Full | | | VPDRFTGSGSGTDFTLTISSVQAEDLAVYYCQN |
| | Sequence | | | DYSYPLTFGAGTKLEIKGGGGSGGGGSGGGGS |
| | | | | EVQLLEQSGAELVRPGTSVKISCKASGYAFTNY |
| | | | | WLGWVKQRPGHGLEWIGDIFPGSGNIHYNEKF |
| | | | | KGKATLTADKSSSTAYMQLSSLTFEDSAVYFC |
| | | | | ARLRNWDEPMDYWGQGTTVTVSSGGGGDKT |
| | | | | HTCPPCPAPELLGGPSVFLFPPKPKDTLMISRTP |
| | | | | EVTCVVVDVSHEDPEVKFNWYVDGVEVHNA |
| | | | | KTKPCEEQYGSTYRCVSVLTVLHQDWLNGKE |
| | | | | YKCKVSNKALPAPIEKTISKAKGQPREPQVYTL |
| | | | | PPSREEMTKNQVSLTCLVKGFYPSDIAVEWES |
| | | | | NGQPENNYKTTPPVLDSDGSFFLYSKLTVDKS |
| | | | | RWQQGNVFSCSVMHEALHNHYTQKSLSLSPG |
| | | | | KGGGGSGGGGSGGGGSGGGGSGGGGSGGGGS |
| | | | | DKTHTCPPCPAPELLGGPSVFLFPPKPKDTLMIS |
| | | | | RTPEVTCVVVDVSHEDPEVKFNWYVDGVEVH |
| | | | | NAKTKPCEEQYGSTYRCVSVLTVLHQDWLNG |
| | | | | KEYKCKVSNKALPAPIEKTISKAKGQPREPQVY |
| | | | | TLPPSREEMTKNQVSLTCLVKGFYPSDIAVEWE |
| | | | | SNGQPENNYKTTPPVLDSDGSFFLYSKLTVDKS |
| | | | | RWQQGNVFSCSVMHEALHNHYTQKSLSLSPG |
| | | | | KGGGGEVQLLESGGGVVQPGRSLRLSCAASGF |
| | | | | TFSSYGMGWVRQAPGKGLEWVAVISYDGSNK |
| | | | | YYADSVKGRFTISRDNSKNTLYLQMNSLRAED |
| | | | | TAVYYCAREGAHFGSGSYYPLYYYYAMDVW |
| | | | | GQGTTVTVSSGGGGSGGGGSGGGGSELTLTQS |
| | | | | PGTLSLSPGERATLSCRASQSVSSSYLAWYQQK |
| | | | | PGQAPRLLIYGASIRATGIPDRFSGSGSGTDFTL |
| | | | | TISRLEPEDFAVYYCQQYGSSPIFTFGPGTKVEI |
| | | | | KSGGGGSEVQLVESGGGLVQPGGSLKLSCAAS |
| | | | | GFTFNKYAMNWVRQAPGKCLEWVARIRSKYN |
| | | | | NYATYYADSVKDRFTISRDDSKNTAYLQMNN |
| | | | | LKTEDTAVYYCVRHGNFGNSYISYWAYWGQG |
| | | | | TLVTVSSGGGGSGGGGSGGGGSQTVVTQEPSL |
| | | | | TVSPGGTVTLTCGSSTGAVTSGNYPNWVQQKP |
| | | | | GQAPRGLIGGTKFLAPGTPARFSGSLLGGKAAL |
| | | | | TLSGVQPEDEAEYYCVLWYSNRWVFGCGTKL |
| | | | | TVLGGGGSGGGGSGGGGSEVQLVESGGGLVQ |
| | | | | PGGSLKLSCAASGFTFNKYAMNWVRQAPGKC |
| | | | | LEWVARIRSKYNNYATYYADSVKDRFTISRDD |
| | | | | SKNTAYLQMNNLKTEDTAVYYCVRHGNFGNS |
| | | | | YISYWAYWGQGTLVTVSSGGGGSGGGGSGGG |
| | | | | GSQTVVTQEPSLTVSPGGTVTLTCGSSTGAVTS |
| | | | | GNYPNWVQQKPGQAPRGLIGGTKFLAPGTPAR |
| | | | | FSGSLLGGKAALTLSGVQPEDEAEYYCVLWYS |
| | | | | NRWVFGCGTKLTVL |
| 343. | EPCAM 5-10 x | artificial | Aa | ELVMTQSPSSLTVTAGEKVTMSCKSSQSLLNS |
| | H2 x scFc x | | | GNQKNYLTWYQQKPGQPPKLLIYWASTRESG |
| | I2Ccc x I2Ccc - | | | VPDRFTGSGSGTDFTLTISSVQAEDLAVYYCQN |
| | Full Sequence | | | DYSYPLTFGAGTKLEIKGGGGSGGGGSGGGGS |
| | | | | EVQLLEQSGAELVRPGTSVKISCKASGYAFTNY |
| | | | | WLGWVKQRPGHGLEWIGDIFPGSGNIHYNEKF |
| | | | | KGKATLTADKSSSTAYMQLSSLTFEDSAVYFC |
| | | | | ARLRNWDEPMDYWGQGTTVTVSSGGGGSEV |
| | | | | QLLESGGGVVQPGRSLRLSCAASGFTFSSYGM |
| | | | | GWVRQAPGKGLEWVAVISYDGSNKYYADSV |
| | | | | KGRFTISRDNSKNTLYLQMNSLRAEDTAVYYC |
| | | | | AREGAHFGSGSYYPLYYYYAMDVWGQGTTV |
| | | | | TVSSGGGGSGGGGSGGGGSELTLTQSPGTLSLS |
| | | | | PGERATLSCRASQSVSSSYLAWYQQKPGQAPR |
| | | | | LLIYGASIRATGIPDRFSGSGSGTDFTLTISRLEP |
| | | | | EDFAVYYCQQYGSSPIFTFGPGTKVEIKSGGGG |
| | | | | DKTHTCPPCPAPELLGGPSVFLFPPKPKDTLMIS |
| | | | | RTPEVTCVVVDVSHEDPEVKFNWYVDGVEVH |
| | | | | NAKTKPCEEQYGSTYRCVSVLTVLHQDWLNG |
| | | | | KEYKCKVSNKALPAPIEKTISKAKGQPREPQVY |
| | | | | TLPPSREEMTKNQVSLTCLVKGFYPSDIAVEWE |
| | | | | SNGQPENNYKTTPPVLDSDGSFFLYSKLTVDKS |
| | | | | RWQQGNVFSCSVMHEALHNHYTQKSLSLSPG |
| | | | | KGGGGSGGGGSGGGGSGGGGSGGGGSGGGGS |
| | | | | DKTHTCPPCPAPELLGGPSVFLFPPKPKDTLMIS |
| | | | | RTPEVTCVVVDVSHEDPEVKFNWYVDGVEVH |
| | | | | NAKTKPCEEQYGSTYRCVSVLTVLHQDWLNG |
| | | | | KEYKCKVSNKALPAPIEKTISKAKGQPREPQVY |
| | | | | TLPPSREEMTKNQVSLTCLVKGFYPSDIAVEWE |
| | | | | SNGQPENNYKTTPPVLDSDGSFFLYSKLTVDKS |
| | | | | RWQQGNVFSCSVMHEALHNHYTQKSLSLSPG |
| | | | | KGGGGEVQLVESGGGLVQPGGSLKLSCAASGF |
| | | | | TFNKYAMNWVRQAPGKCLEWVARIRSKYNN |
| | | | | YATYYADSVKDRFTISRDDSKNTAYLQMNNL |
| | | | | KTEDTAVYYCVRHGNFGNSYISYWAYWGQGT |
| | | | | LVTVSSGGGGSGGGGSGGGGSQTVVTQEPSLT |
| | | | | VSPGGTVTLTCGSSTGAVTSGNYPNWVQQKPG |
| | | | | QAPRGLIGGTKFLAPGTPARFSGSLLGGKAALT |
| | | | | LSGVQPEDEAEYYCVLWYSNRWVFGCGTKLT |
| | | | | VLGGGGSGGGGSGGGGSEVQLVESGGGLVQP |
| | | | | GGSLKLSCAASGFTFNKYAMNWVRQAPGKCL |
| | | | | EWVARIRSKYNNYATYYADSVKDRFTISRDDS |
| | | | | KNTAYLQMNNLKTEDTAVYYCVRHGNFGNSY |
| | | | | ISYWAYWGQGTLVTVSSGGGGSGGGGSGGGG |
| | | | | SQTVVTQEPSLTVSPGGTVTLTCGSSTGAVTSG |
| | | | | NYPNWVQQKPGQAPRGLIGGTKFLAPGTPARF |
| | | | | SGSLLGGKAALTLSGVQPEDEAEYYCVLWYSN |
| | | | | RWVFGCGTKLTVL |
| 344. | EPCAM 5-10 x | artificial | Aa | ELVMTQSPSSLTVTAGEKVTMSCKSSQSLLNS |
| | H2 x I2Ccc x scFc | | | GNQKNYLTWYQQKPGQPPKLLIYWASTRESG |
| | x I2Ccc - Full | | | VPDRFTGSGSGTDFTLTISSVQAEDLAVYYCQN |
| | Sequence | | | DYSYPLTFGAGTKLEIKGGGGSGGGGSGGGGS |
| | | | | EVQLLEQSGAELVRPGTSVKISCKASGYAFTNY |
| | | | | WLGWVKQRPGHGLEWIGDIFPGSGNIHYNEKF |
| | | | | KGKATLTADKSSSTAYMQLSSLTFEDSAVYFC |
| | | | | ARLRNWDEPMDYWGQGTTVTVSSGGGGSEV |
| | | | | QLLESGGGVVQPGRSLRLSCAASGFTFSSYGM |
| | | | | GWVRQAPGKGLEWVAVISYDGSNKYYADSV |
| | | | | KGRFTISRDNSKNTLYLQMNSLRAEDTAVYYC |
| | | | | AREGAHFGSGSYYPLYYYYAMDVWGQGTTV |
| | | | | TVSSGGGGSGGGGSGGGGSELTLTQSPGTLSLS |
| | | | | PGERATLSCRASQSVSSSYLAWYQQKPGQAPR |
| | | | | LLIYGASIRATGIPDRESGSGSGTDFTLTISRLEP |
| | | | | EDFAVYYCQQYGSSPIFTFGPGTKVEIKSGGGG |
| | | | | SEVQLVESGGGLVQPGGSLKLSCAASGFTENK |
| | | | | YAMNWVRQAPGKCLEWVARIRSKYNNYATY |
| | | | | YADSVKDRFTISRDDSKNTAYLQMNNLKTEDT |
| | | | | AVYYCVRHGNFGNSYISYWAYWGQGTLVTVS |
| | | | | SGGGGSGGGGSGGGGSQTVVTQEPSLTVSPGG |
| | | | | TVTLTCGSSTGAVTSGNYPNWVQQKPGQAPR |
| | | | | GLIGGTKFLAPGTPARFSGSLLGGKAALTLSGV |
| | | | | QPEDEAEYYCVLWYSNRWVFGCGTKLTVLGG |
| | | | | GGDKTHTCPPCPAPELLGGPSVFLFPPKPKDTL |
| | | | | MISRTPEVTCVVVDVSHEDPEVKFNWYVDGV |
| | | | | EVHNAKTKPCEEQYGSTYRCVSVLTVLHQDW |
| | | | | LNGKEYKCKVSNKALPAPIEKTISKAKGQPREP |
| | | | | QVYTLPPSREEMTKNQVSLTCLVKGFYPSDIAV |
| | | | | EWESNGQPENNYKTTPPVLDSDGSFFLYSKLT |
| | | | | VDKSRWQQGNVFSCSVMHEALHNHYTQKSLS |
| | | | | LSPGKGGGGSGGGGSGGGGSGGGGSGGGGSG |
| | | | | GGGSDKTHTCPPCPAPELLGGPSVFLFPPKPKD |
| | | | | TLMISRTPEVTCVVVDVSHEDPEVKFNWYVDG |
| | | | | VEVHNAKTKPCEEQYGSTYRCVSVLTVLHQD |
| | | | | WLNGKEYKCKVSNKALPAPIEKTISKAKGQPR |
| | | | | EPQVYTLPPSREEMTKNQVSLTCLVKGFYPSDI |
| | | | | AVEWESNGQPENNYKTTPPVLDSDGSFFLYSK |
| | | | | LTVDKSRWQQGNVFSCSVMHEALHNHYTQKS |
| | | | | LSLSPGKGGGGEVQLVESGGGLVQPGGSLKLS |
| | | | | CAASGFTFNKYAMNWVRQAPGKCLEWVARIR |
| | | | | SKYNNYATYYADSVKDRFTISRDDSKNTAYLQ |
| | | | | MNNLKTEDTAVYYCVRHGNFGNSYISYWAY |
| | | | | WGQGTLVTVSSGGGGSGGGGSGGGGSQTVVT |
| | | | | QEPSLTVSPGGTVTLTCGSSTGAVTSGNYPNW |
| | | | | VQQKPGQAPRGLIGGTKFLAPGTPARFSGSLLG |
| | | | | GKAALTLSGVQPEDEAEYYCVLWYSNRWVFG |
| | | | | CGTKLTVL |
| 345. | EPCAM 5-10 x | artificial | Aa | ELVMTQSPSSLTVTAGEKVTMSCKSSQSLLNS |
| | H2 x I2Ccc x | | | GNQKNYLTWYQQKPGQPPKLLIYWASTRESG |
| | I2Ccc x scFc - | | | VPDRFTGSGSGTDFTLTISSVQAEDLAVYYCQN |
| | Full Sequence | | | DYSYPLTFGAGTKLEIKGGGGSGGGGSGGGGS |
| | | | | EVQLLEQSGAELVRPGTSVKISCKASGYAFTNY |
| | | | | WLGWVKQRPGHGLEWIGDIFPGSGNIHYNEKF |
| | | | | KGKATLTADKSSSTAYMQLSSLTFEDSAVYFC |
| | | | | ARLRNWDEPMDYWGQGTTVTVSSGGGGSEV |
| | | | | QLLESGGGVVQPGRSLRLSCAASGFTFSSYGM |
| | | | | GWVRQAPGKGLEWVAVISYDGSNKYYADSV |
| | | | | KGRFTISRDNSKNTLYLQMNSLRAEDTAVYYC |
| | | | | AREGAHFGSGSYYPLYYYYAMDVWGQGTTV |
| | | | | TVSSGGGGSGGGGSGGGGSELTLTQSPGTLSLS |
| | | | | PGERATLSCRASQSVSSSYLAWYQQKPGQAPR |
| | | | | LLIYGASIRATGIPDRESGSGSGTDFTLTISRLEP |
| | | | | EDFAVYYCQQYGSSPIFTFGPGTKVEIKSGGGG |
| | | | | SEVQLVESGGGLVQPGGSLKLSCAASGFTFNK |
| | | | | YAMNWVRQAPGKCLEWVARIRSKYNNYATY |
| | | | | YADSVKDRFTISRDDSKNTAYLQMNNLKTEDT |
| | | | | AVYYCVRHGNFGNSYISYWAYWGQGTLVTVS |
| | | | | SGGGGSGGGGSGGGGSQTVVTQEPSLTVSPGG |
| | | | | TVTLTCGSSTGAVTSGNYPNWVQQKPGQAPR |
| | | | | GLIGGTKFLAPGTPARFSGSLLGGKAALTLSGV |
| | | | | QPEDEAEYYCVLWYSNRWVFGCGTKLTVLGG |
| | | | | GGSGGGGSGGGGSEVQLVESGGGLVQPGGSL |
| | | | | KLSCAASGFTFNKYAMNWVRQAPGKCLEWV |
| | | | | ARIRSKYNNYATYYADSVKDRFTISRDDSKNT |
| | | | | AYLQMNNLKTEDTAVYYCVRHGNFGNSYISY |
| | | | | WAYWGQGTLVTVSSGGGGSGGGGSGGGGSQ |
| | | | | TVVTQEPSLTVSPGGTVTLTCGSSTGAVTSGNY |
| | | | | PNWVQQKPGQAPRGLIGGTKFLAPGTPARFSG |
| | | | | SLLGGKAALTLSGVQPEDEAEYYCVLWYSNR |
| | | | | WVFGCGTKLTVLGGGGDKTHTCPPCPAPELLG |
| | | | | GPSVFLFPPKPKDTLMISRTPEVTCVVVDVSHE |
| | | | | DPEVKFNWYVDGVEVHNAKTKPCEEQYGSTY |
| | | | | RCVSVLTVLHQDWLNGKEYKCKVSNKALPAPI |
| | | | | EKTISKAKGQPREPQVYTLPPSREEMTKNQVSL |
| | | | | TCLVKGFYPSDIAVEWESNGQPENNYKTTPPV |
| | | | | LDSDGSFFLYSKLTVDKSRWQQGNVFSCSVMH |
| | | | | EALHNHYTQKSLSLSPGKGGGGSGGGGSGGG |
| | | | | GSGGGGSGGGGSGGGGSDKTHTCPPCPAPELL |
| | | | | GGPSVFLFPPKPKDTLMISRTPEVTCVVVDVSH |
| | | | | EDPEVKFNWYVDGVEVHNAKTKPCEEQYGST |
| | | | | YRCVSVLTVLHQDWLNGKEYKCKVSNKALPA |
| | | | | PIEKTISKAKGQPREPQVYTLPPSREEMTKNQV |
| | | | | SLTCLVKGFYPSDIAVEWESNGQPENNYKTTPP |
| | | | | VLDSDGSFFLYSKLTVDKSRWQQGNVFSCSVM |
| | | | | HEALHNHYTQKSLSLSPGK |
| 346. | EPCAM 5-10 x | artificial | Aa | ELVMTQSPSSLTVTAGEKVTMSCKSSQSLLNS |
| | I2C x scFc x I2C x | | | GNQKNYLTWYQQKPGQPPKLLIYWASTRESG |
| | H2 - Full | | | VPDRFTGSGSGTDFTLTISSVQAEDLAVYYCQN |
| | Sequence | | | DYSYPLTFGAGTKLEIKGGGGSGGGGSGGGGS |
| | | | | EVQLLEQSGAELVRPGTSVKISCKASGYAFTNY |
| | | | | WLGWVKQRPGHGLEWIGDIFPGSGNIHYNEKF |
| | | | | KGKATLTADKSSSTAYMQLSSLTFEDSAVYFC |
| | | | | ARLRNWDEPMDYWGQGTTVTVSSGGGGSEV |
| | | | | QLVESGGGLVQPGGSLKLSCAASGFTFNKYAM |
| | | | | NWVRQAPGKGLEWVARIRSKYNNYATYYADS |
| | | | | VKDRFTISRDDSKNTAYLQMNNLKTEDTAVY |
| | | | | YCVRHGNFGNSYISYWAYWGQGTLVTVSSGG |
| | | | | GGSGGGGSGGGGSQTVVTQEPSLTVSPGGTVT |
| | | | | LTCGSSTGAVTSGNYPNWVQQKPGQAPRGLIG |
| | | | | GTKFLAPGTPARFSGSLLGGKAALTLSGVQPED |
| | | | | EAEYYCVLWYSNRWVFGGGTKLTVLGGGGSG |
| | | | | GGGSGGGGSDKTHTCPPCPAPELLGGPSVFLFP |
| | | | | PKPKDTLMISRTPEVTCVVVDVSHEDPEVKFN |
| | | | | WYVDGVEVHNAKTKPCEEQYGSTYRCVSVLT |
| | | | | VLHQDWLNGKEYKCKVSNKALPAPIEKTISKA |
| | | | | KGQPREPQVYTLPPSREEMTKNQVSLTCLVKG |
| | | | | FYPSDIAVEWESNGQPENNYKTTPPVLDSDGSF |
| | | | | FLYSKLTVDKSRWQQGNVFSCSVMHEALHNH |
| | | | | YTQKSLSLSPGKGGGGSGGGGSGGGGSGGGGS |
| | | | | GGGGSGGGGSDKTHTCPPCPAPELLGGPSVFLF |
| | | | | PPKPKDTLMISRTPEVTCVVVDVSHEDPEVKFN |
| | | | | WYVDGVEVHNAKTKPCEEQYGSTYRCVSVLT |
| | | | | VLHQDWLNGKEYKCKVSNKALPAPIEKTISKA |
| | | | | KGQPREPQVYTLPPSREEMTKNQVSLTCLVKG |
| | | | | FYPSDIAVEWESNGQPENNYKTTPPVLDSDGSF |
| | | | | FLYSKLTVDKSRWQQGNVFSCSVMHEALHNH |
| | | | | YTQKSLSLSPGKGGGGSGGGGSGGGGSEVQLV |
| | | | | ESGGGLVQPGGSLKLSCAASGFTFNKYAMNW |
| | | | | VRQAPGKGLEWVARIRSKYNNYATYYADSVK |
| | | | | DRFTISRDDSKNTAYLQMNNLKTEDTAVYYCV |
| | | | | RHGNFGNSYISYWAYWGQGTLVTVSSGGGGS |
| | | | | GGGGSGGGGSQTVVTQEPSLTVSPGGTVTLTC |
| | | | | GSSTGAVTSGNYPNWVQQKPGQAPRGLIGGTK |
| | | | | FLAPGTPARFSGSLLGGKAALTLSGVQPEDEAE |
| | | | | YYCVLWYSNRWVFGGGTKLTVLGGGGSEVQL |
| | | | | LESGGGVVQPGRSLRLSCAASGFTFSSYGMGW |
| | | | | VRQAPGKGLEWVAVISYDGSNKYYADSVKGR |
| | | | | FTISRDNSKNTLYLQMNSLRAEDTAVYYCARE |
| | | | | GAHFGSGSYYPLYYYYAMDVWGQGTTVTVSS |
| | | | | GGGGSGGGGSGGGGSELTLTQSPGTLSLSPGER |
| | | | | ATLSCRASQSVSSSYLAWYQQKPGQAPRLLIY |
| | | | | GASIRATGIPDRFSGSGSGTDFTLTISRLEPEDFA |
| | | | | VYYCQQYGSSPIFTFGPGTKVEIK |
| 347. | EPCAM 5-10 x | artificial | aa | ELVMTQSPSSLTVTAGEKVTMSCKSSQSLLNS |
| | I2Ccc x H2 x | | | GNQKNYLTWYQQKPGQPPKLLIYWASTRESG |
| | I2Ccc - Full | | | VPDRFTGSGSGTDFTLTISSVQAEDLAVYYCQN |
| | Sequence | | | DYSYPLTFGAGTKLEIKGGGGSGGGGSGGGGS |
| | | | | EVQLLEQSGAELVRPGTSVKISCKASGYAFTNY |
| | | | | WLGWVKQRPGHGLEWIGDIFPGSGNIHYNEKF |
| | | | | KGKATLTADKSSSTAYMQLSSLTFEDSAVYFC |
| | | | | ARLRNWDEPMDYWGQGTTVTVSSGGGGSEV |
| | | | | QLVESGGGLVQPGGSLKLSCAASGFTFNKYAM |
| | | | | NWVRQAPGKCLEWVARIRSKYNNYATYYADS |
| | | | | VKDRFTISRDDSKNTAYLQMNNLKTEDTAVY |
| | | | | YCVRHGNFGNSYISYWAYWGQGTLVTVSSGG |
| | | | | GGSGGGGSGGGGSQTVVTQEPSLTVSPGGTVT |
| | | | | LTCGSSTGAVTSGNYPNWVQQKPGQAPRGLIG |
| | | | | GTKFLAPGTPARFSGSLLGGKAALTLSGVQPED |
| | | | | EAEYYCVLWYSNRWVFGCGTKLTVLGGGGSE |
| | | | | VQLLESGGGVVQPGRSLRLSCAASGFTFSSYG |
| | | | | MGWVRQAPGKGLEWVAVISYDGSNKYYADS |
| | | | | VKGRFTISRDNSKNTLYLQMNSLRAEDTAVYY |
| | | | | CAREGAHFGSGSYYPLYYYYAMDVWGQGTT |
| | | | | VTVSSGGGGSGGGGSGGGGSELTLTQSPGTLS |
| | | | | LSPGERATLSCRASQSVSSSYLAWYQQKPGQA |
| | | | | PRLLIYGASIRATGIPDRESGSGSGTDFTLTISRL |
| | | | | EPEDFAVYYCQQYGSSPIFTFGPGTKVEIKSGG |
| | | | | GGSEVQLVESGGGLVQPGGSLKLSCAASGFTF |
| | | | | NKYAMNWVRQAPGKCLEWVARIRSKYNNYA |
| | | | | TYYADSVKDRFTISRDDSKNTAYLQMNNLKTE |
| | | | | DTAVYYCVRHGNFGNSYISYWAYWGQGTLVT |
| | | | | VSSGGGGSGGGGSGGGGSQTVVTQEPSLTVSP |
| | | | | GGTVTLTCGSSTGAVTSGNYPNWVQQKPGQA |
| | | | | PRGLIGGTKFLAPGTPARFSGSLLGGKAALTLS |
| | | | | GVQPEDEAEYYCVLWYSNRWVFGCGTKLTVL |
| 348. | EPCAM 5-10 x | artificial | aa | ELVMTQSPSSLTVTAGEKVTMSCKSSQSLLNS |
| | I2Ccc x scFc x H2 | | | GNQKNYLTWYQQKPGQPPKLLIYWASTRESG |
| | x I2Ccc - Full | | | VPDRFTGSGSGTDFTLTISSVQAEDLAVYYCQN |
| | Sequence | | | DYSYPLTFGAGTKLEIKGGGGSGGGGSGGGGS |
| | | | | EVQLLEQSGAELVRPGTSVKISCKASGYAFTNY |
| | | | | WLGWVKQRPGHGLEWIGDIFPGSGNIHYNEKF |
| | | | | KGKATLTADKSSSTAYMQLSSLTFEDSAVYFC |
| | | | | ARLRNWDEPMDYWGQGTTVTVSSGGGGSEV |
| | | | | QLVESGGGLVQPGGSLKLSCAASGFTFNKYAM |
| | | | | NWVRQAPGKCLEWVARIRSKYNNYATYYADS |
| | | | | VKDRFTISRDDSKNTAYLQMNNLKTEDTAVY |
| | | | | YCVRHGNFGNSYISYWAYWGQGTLVTVSSGG |
| | | | | GGSGGGGSGGGGSQTVVTQEPSLTVSPGGTVT |
| | | | | LTCGSSTGAVTSGNYPNWVQQKPGQAPRGLIG |
| | | | | GTKFLAPGTPARFSGSLLGGKAALTLSGVQPED |
| | | | | EAEYYCVLWYSNRWVFGCGTKLTVLGGGGSG |
| | | | | GGGSGGGGSDKTHTCPPCPAPELLGGPSVFLFP |
| | | | | PKPKDTLMISRTPEVTCVVVDVSHEDPEVKEN |
| | | | | WYVDGVEVHNAKTKPCEEQYGSTYRCVSVLT |
| | | | | VLHQDWLNGKEYKCKVSNKALPAPIEKTISKA |
| | | | | KGQPREPQVYTLPPSREEMTKNQVSLTCLVKG |
| | | | | FYPSDIAVEWESNGQPENNYKTTPPVLDSDGSF |
| | | | | FLYSKLTVDKSRWQQGNVFSCSVMHEALHNH |
| | | | | YTQKSLSLSPGKGGGGSGGGGSGGGGSGGGGS |
| | | | | GGGGSGGGGSDKTHTCPPCPAPELLGGPSVFLF |
| | | | | PPKPKDTLMISRTPEVTCVVVDVSHEDPEVKFN |
| | | | | WYVDGVEVHNAKTKPCEEQYGSTYRCVSVLT |
| | | | | VLHQDWLNGKEYKCKVSNKALPAPIEKTISKA |
| | | | | KGQPREPQVYTLPPSREEMTKNQVSLTCLVKG |
| | | | | FYPSDIAVEWESNGQPENNYKTTPPVLDSDGSF |
| | | | | FLYSKLTVDKSRWQQGNVFSCSVMHEALHNH |
| | | | | YTQKSLSLSPGKGGGGSGGGGSGGGGSEVQLL |
| | | | | ESGGGVVQPGRSLRLSCAASGFTFSSYGMGWV |
| | | | | RQAPGKGLEWVAVISYDGSNKYYADSVKGRF |
| | | | | TISRDNSKNTLYLQMNSLRAEDTAVYYCAREG |
| | | | | AHFGSGSYYPLYYYYAMDVWGQGTTVTVSSG |
| | | | | GGGSGGGGSGGGGSELTLTQSPGTLSLSPGERA |
| | | | | TLSCRASQSVSSSYLAWYQQKPGQAPRLLIYG |
| | | | | ASIRATGIPDRFSGSGSGTDFTLTISRLEPEDFAV |
| | | | | YYCQQYGSSPIFTFGPGTKVEIKSGGGGSEVQL |
| | | | | VESGGGLVQPGGSLKLSCAASGFTFNKYAMN |
| | | | | WVRQAPGKCLEWVARIRSKYNNYATYYADSV |
| | | | | KDRFTISRDDSKNTAYLQMNNLKTEDTAVYYC |
| | | | | VRHGNFGNSYISYWAYWGQGTLVTVSSGGGG |
| | | | | SGGGGSGGGGSQTVVTQEPSLTVSPGGTVTLT |
| | | | | CGSSTGAVTSGNYPNWVQQKPGQAPRGLIGGT |
| | | | | KFLAPGTPARFSGSLLGGKAALTLSGVQPEDEA |
| | | | | EYYCVLWYSNRWVFGCGTKLTVL |
| 349. | EPCAM 5-10 x | artificial | aa | ELVMTQSPSSLTVTAGEKVTMSCKSSQSLLNS |
| | I2Ccc x scFc x | | | GNQKNYLTWYQQKPGQPPKLLIYWASTRESG |
| | I2Ccc x H2 - Full | | | VPDRFTGSGSGTDFTLTISSVQAEDLAVYYCQN |
| | Sequence | | | DYSYPLTFGAGTKLEIKGGGGSGGGGSGGGGS |
| | | | | EVQLLEQSGAELVRPGTSVKISCKASGYAFTNY |
| | | | | WLGWVKQRPGHGLEWIGDIFPGSGNIHYNEKF |
| | | | | KGKATLTADKSSSTAYMQLSSLTFEDSAVYFC |
| | | | | ARLRNWDEPMDYWGQGTTVTVSSGGGGSEV |
| | | | | QLVESGGGLVQPGGSLKLSCAASGFTFNKYAM |
| | | | | NWVRQAPGKCLEWVARIRSKYNNYATYYADS |
| | | | | VKDRFTISRDDSKNTAYLQMNNLKTEDTAVY |
| | | | | YCVRHGNFGNSYISYWAYWGQGTLVTVSSGG |
| | | | | GGSGGGGSGGGGSQTVVTQEPSLTVSPGGTVT |
| | | | | LTCGSSTGAVTSGNYPNWVQQKPGQAPRGLIG |
| | | | | GTKFLAPGTPARFSGSLLGGKAALTLSGVQPED |
| | | | | EAEYYCVLWYSNRWVFGCGTKLTVLGGGGSG |
| | | | | GGGSGGGGSDKTHTCPPCPAPELLGGPSVFLFP |
| | | | | PKPKDTLMISRTPEVTCVVVDVSHEDPEVKEN |
| | | | | WYVDGVEVHNAKTKPCEEQYGSTYRCVSVLT |
| | | | | VLHQDWLNGKEYKCKVSNKALPAPIEKTISKA |
| | | | | KGQPREPQVYTLPPSREEMTKNQVSLTCLVKG |
| | | | | FYPSDIAVEWESNGQPENNYKTTPPVLDSDGSF |
| | | | | FLYSKLTVDKSRWQQGNVFSCSVMHEALHNH |
| | | | | YTQKSLSLSPGKGGGGSGGGGSGGGGSGGGGS |
| | | | | GGGGSGGGGSDKTHTCPPCPAPELLGGPSVFLF |
| | | | | PPKPKDTLMISRTPEVTCVVVDVSHEDPEVKFN |
| | | | | WYVDGVEVHNAKTKPCEEQYGSTYRCVSVLT |
| | | | | VLHQDWLNGKEYKCKVSNKALPAPIEKTISKA |
| | | | | KGQPREPQVYTLPPSREEMTKNQVSLTCLVKG |
| | | | | FYPSDIAVEWESNGQPENNYKTTPPVLDSDGSF |
| | | | | FLYSKLTVDKSRWQQGNVFSCSVMHEALHNH |
| | | | | YTQKSLSLSPGKGGGGSGGGGSGGGGSEVQLV |
| | | | | ESGGGLVQPGGSLKLSCAASGFTFNKYAMNW |
| | | | | VRQAPGKCLEWVARIRSKYNNYATYYADSVK |
| | | | | DRFTISRDDSKNTAYLQMNNLKTEDTAVYYCV |
| | | | | RHGNFGNSYISYWAYWGQGTLVTVSSGGGGS |
| | | | | GGGGSGGGGSQTVVTQEPSLTVSPGGTVTLTC |
| | | | | GSSTGAVTSGNYPNWVQQKPGQAPRGLIGGTK |
| | | | | FLAPGTPARFSGSLLGGKAALTLSGVQPEDEAE |
| | | | | YYCVLWYSNRWVFGCGTKLTVLGGGGSEVQL |
| | | | | LESGGGVVQPGRSLRLSCAASGFTFSSYGMGW |
| | | | | VRQAPGKGLEWVAVISYDGSNKYYADSVKGR |
| | | | | FTISRDNSKNTLYLQMNSLRAEDTAVYYCARE |
| | | | | GAHFGSGSYYPLYYYYAMDVWGQGTTVTVSS |
| | | | | GGGGSGGGGSGGGGSELTLTQSPGTLSLSPGER |
| | | | | ATLSCRASQSVSSSYLAWYQQKPGQAPRLLIY |
| | | | | GASIRATGIPDRFSGSGSGTDFTLTISRLEPEDFA |
| | | | | VYYCQQYGSSPIFTFGPGTKVEIK |
| 350. | EPCAM 5-10 x | artificial | aa | ELVMTQSPSSLTVTAGEKVTMSCKSSQSLLNS |
| | I2Cccx (G4S)10 x | | | GNQKNYLTWYQQKPGQPPKLLIYWASTRESG |
| | H2 x I2Ccc - Full | | | VPDRFTGSGSGTDFTLTISSVQAEDLAVYYCQN |
| | Sequence | | | DYSYPLTFGAGTKLEIKGGGGSGGGGSGGGGS |
| | | | | EVQLLEQSGAELVRPGTSVKISCKASGYAFTNY |
| | | | | WLGWVKQRPGHGLEWIGDIFPGSGNIHYNEKF |
| | | | | KGKATLTADKSSSTAYMQLSSLTFEDSAVYFC |
| | | | | ARLRNWDEPMDYWGQGTTVTVSSGGGGSEV |
| | | | | QLVESGGGLVQPGGSLKLSCAASGFTFNKYAM |
| | | | | NWVRQAPGKCLEWVARIRSKYNNYATYYADS |
| | | | | VKDRFTISRDDSKNTAYLQMNNLKTEDTAVY |
| | | | | YCVRHGNFGNSYISYWAYWGQGTLVTVSSGG |
| | | | | GGSGGGGSGGGGSQTVVTQEPSLTVSPGGTVT |
| | | | | LTCGSSTGAVTSGNYPNWVQQKPGQAPRGLIG |
| | | | | GTKFLAPGTPARFSGSLLGGKAALTLSGVQPED |
| | | | | EAEYYCVLWYSNRWVFGCGTKLTVLGGGGSG |
| | | | | GGGSGGGGSGGGGSGGGGSGGGGSGGGGSGG |
| | | | | GGSGGGGSGGGGSEVQLLESGGGVVQPGRSLR |
| | | | | LSCAASGFTFSSYGMGWVRQAPGKGLEWVAV |
| | | | | ISYDGSNKYYADSVKGRFTISRDNSKNTLYLQ |
| | | | | MNSLRAEDTAVYYCAREGAHFGSGSYYPLYY |
| | | | | YYAMDVWGQGTTVTVSSGGGGSGGGGSGGG |
| | | | | GSELTLTQSPGTLSLSPGERATLSCRASQSVSSS |
| | | | | YLAWYQQKPGQAPRLLIYGASIRATGIPDRESG |
| | | | | SGSGTDFTLTISRLEPEDFAVYYCQQYGSSPIFT |
| | | | | FGPGTKVEIKSGGGGSEVQLVESGGGLVQPGG |
| | | | | SLKLSCAASGFTFNKYAMNWVRQAPGKCLEW |
| | | | | VARIRSKYNNYATYYADSVKDRFTISRDDSKN |
| | | | | TAYLQMNNLKTEDTAVYYCVRHGNFGNSYIS |
| | | | | YWAYWGQGTLVTVSSGGGGSGGGGSGGGGS |
| | | | | QTVVTQEPSLTVSPGGTVTLTCGSSTGAVTSGN |
| | | | | YPNWVQQKPGQAPRGLIGGTKFLAPGTPARFS |
| | | | | GSLLGGKAALTLSGVQPEDEAEYYCVLWYSN |
| | | | | RWVFGCGTKLTVL |
| 351. | EPCAM 5-10 x | artificial | aa | ELVMTQSPSSLTVTAGEKVTMSCKSSQSLLNS |
| | I2Cccx G4Sx | | | GNQKNYLTWYQQKPGQPPKLLIYWASTRESG |
| | PD1xG4S x H2 x | | | VPDRFTGSGSGTDFTLTISSVQAEDLAVYYCQN |
| | I2Ccc - Full | | | DYSYPLTFGAGTKLEIKGGGGSGGGGSGGGGS |
| | Sequence | | | EVQLLEQSGAELVRPGTSVKISCKASGYAFTNY |
| | | | | WLGWVKQRPGHGLEWIGDIFPGSGNIHYNEKF |
| | | | | KGKATLTADKSSSTAYMQLSSLTFEDSAVYFC |
| | | | | ARLRNWDEPMDYWGQGTTVTVSSGGGGSEV |
| | | | | QLVESGGGLVQPGGSLKLSCAASGFTFNKYAM |
| | | | | NWVRQAPGKCLEWVARIRSKYNNYATYYADS |
| | | | | VKDRFTISRDDSKNTAYLQMNNLKTEDTAVY |
| | | | | YCVRHGNFGNSYISYWAYWGQGTLVTVSSGG |
| | | | | GGSGGGGSGGGGSQTVVTQEPSLTVSPGGTVT |
| | | | | LTCGSSTGAVTSGNYPNWVQQKPGQAPRGLIG |
| | | | | GTKFLAPGTPARFSGSLLGGKAALTLSGVQPED |
| | | | | EAEYYCVLWYSNRWVFGCGTKLTVLGGGGSL |
| | | | | DSPDRPWNPPTFSPALLVVTEGDNATFTCSFSN |
| | | | | TSESFVLNWYRMSPSNQTDKLAAFPEDRSQPG |
| | | | | QDCRFRVTQLPNGRDFHMSVVRARRNDSGTY |
| | | | | LCGAISLAPKAQIKESLRAELRVTERRAEVPTA |
| | | | | HPSPSPRPAGQFQGGGGSEVQLLESGGGVVQP |
| | | | | GRSLRLSCAASGFTFSSYGMGWVRQAPGKGLE |
| | | | | WVAVISYDGSNKYYADSVKGRFTISRDNSKNT |
| | | | | LYLQMNSLRAEDTAVYYCAREGAHFGSGSYY |
| | | | | PLYYYYAMDVWGQGTTVTVSSGGGGSGGGG |
| | | | | SGGGGSELTLTQSPGTLSLSPGERATLSCRASQ |
| | | | | SVSSSYLAWYQQKPGQAPRLLIYGASIRATGIP |
| | | | | DRFSGSGSGTDFTLTISRLEPEDFAVYYCQQYG |
| | | | | SSPIFTFGPGTKVEIKSGGGGSEVQLVESGGGL |
| | | | | VQPGGSLKLSCAASGFTFNKYAMNWVRQAPG |
| | | | | KCLEWVARIRSKYNNYATYYADSVKDRFTISR |
| | | | | DDSKNTAYLQMNNLKTEDTAVYYCVRHGNFG |
| | | | | NSYISYWAYWGQGTLVTVSSGGGGSGGGGSG |
| | | | | GGGSQTVVTQEPSLTVSPGGTVTLTCGSSTGA |
| | | | | VTSGNYPNWVQQKPGQAPRGLIGGTKFLAPGT |
| | | | | PARFSGSLLGGKAALTLSGVQPEDEAEYYCVL |
| | | | | WYSNRWVFGCGTKLTVL |
| 352. | EpCAM_5- | artificial | aa | ELVMTQSPSSLTVTAGEKVTMSCKSSQSLLNS |
| | 10_x(EAAAK)10 | | | GNQKNYLTWYQQKPGQPPKLLIYWASTRESG |
| | _x | | | VPDRFTGSGSGTDFTLTISSVQAEDLAVYYCQN |
| | I2Ccc_xG4_xscFc | | | DYSYPLTFGAGTKLEIKGGGGSGGGGSGGGGS |
| | _xG4_xMSLN_H | | | EVQLLEQSGAELVRPGTSVKISCKASGYAFTNY |
| | _x(EAAAK)10_x | | | WLGWVKQRPGHGLEWIGDIFPGSGNIHYNEKF |
| | I2Ccc - Full | | | KGKATLTADKSSSTAYMQLSSLTFEDSAVYFC |
| | Sequence | | | ARLRNWDEPMDYWGQGTTVTVSSGEAAAKE |
| | | | | AAAKEAAAKEAAAKEAAAKEAAAKEAAAKE |
| | | | | AAAKEAAAKEAAAKEVQLVESGGGLVQPGGS |
| | | | | LKLSCAASGFTFNKYAMNWVRQAPGKCLEWV |
| | | | | ARIRSKYNNYATYYADSVKDRFTISRDDSKNT |
| | | | | AYLQMNNLKTEDTAVYYCVRHGNFGNSYISY |
| | | | | WAYWGQGTLVTVSSGGGGSGGGGSGGGGSQ |
| | | | | TVVTQEPSLTVSPGGTVTLTCGSSTGAVTSGNY |
| | | | | PNWVQQKPGQAPRGLIGGTKFLAPGTPARFSG |
| | | | | SLLGGKAALTLSGVQPEDEAEYYCVLWYSNR |
| | | | | WVFGCGTKLTVLGGGGDKTHTCPPCPAPELLG |
| | | | | GPSVFLFPPKPKDTLMISRTPEVTCVVVDVSHE |
| | | | | DPEVKFNWYVDGVEVHNAKTKPCEEQYGSTY |
| | | | | RCVSVLTVLHQDWLNGKEYKCKVSNKALPAPI |
| | | | | EKTISKAKGQPREPQVYTLPPSREEMTKNQVSL |
| | | | | TCLVKGFYPSDIAVEWESNGQPENNYKTTPPV |
| | | | | LDSDGSFFLYSKLTVDKSRWQQGNVFSCSVMH |
| | | | | EALHNHYTQKSLSLSPGKGGGGSGGGGSGGG |
| | | | | GSGGGGSGGGGSGGGGSDKTHTCPPCPAPELL |
| | | | | GGPSVFLFPPKPKDTLMISRTPEVTCVVVDVSH |
| | | | | EDPEVKFNWYVDGVEVHNAKTKPCEEQYGST |
| | | | | YRCVSVLTVLHQDWLNGKEYKCKVSNKALPA |
| | | | | PIEKTISKAKGQPREPQVYTLPPSREEMTKNQV |
| | | | | SLTCLVKGFYPSDIAVEWESNGQPENNYKTTPP |
| | | | | VLDSDGSFFLYSKLTVDKSRWQQGNVFSCSVM |
| | | | | HEALHNHYTQKSLSLSPGKGGGGEVQLLESGG |
| | | | | GVVQPGRSLRLSCAASGFTFSSYGMGWVRQAP |
| | | | | GKGLEWVAVISYDGSNKYYADSVKGRFTISRD |
| | | | | NSKNTLYLQMNSLRAEDTAVYYCAREGAHFG |
| | | | | SGSYYPLYYYYAMDVWGQGTTVTVSSGGGGS |
| | | | | GGGGSGGGGSELTLTQSPGTLSLSPGERATLSC |
| | | | | RASQSVSSSYLAWYQQKPGQAPRLLIYGASIRA |
| | | | | TGIPDRFSGSGSGTDFTLTISRLEPEDFAVYYCQ |
| | | | | QYGSSPIFTFGPGTKVEIKSGEAAAKEAAAKEA |
| | | | | AAKEAAAKEAAAKEAAAKEAAAKEAAAKEA |
| | | | | AAKEAAAKEVQLVESGGGLVQPGGSLKLSCA |
| | | | | ASGFTFNKYAMNWVRQAPGKCLEWVARIRSK |
| | | | | YNNYATYYADSVKDRFTISRDDSKNTAYLQM |
| | | | | NNLKTEDTAVYYCVRHGNFGNSYISYWAYWG |
| | | | | QGTLVTVSSGGGGSGGGGSGGGGSQTVVTQEP |
| | | | | SLTVSPGGTVTLTCGSSTGAVTSGNYPNWVQQ |
| | | | | KPGQAPRGLIGGTKFLAPGTPARFSGSLLGGKA |
| | | | | ALTLSGVQPEDEAEYYCVLWYSNRWVFGCGT |
| | | | | KLTVL |
| 353. | EpCAM_5- | artificial | aa | ELVMTQSPSSLTVTAGEKVTMSCKSSQSLLNS |
| | 10_x(G4S)3_x | | | GNQKNYLTWYQQKPGQPPKLLIYWASTRESG |
| | I2Ccc_xG4_xscFc | | | VPDRFTGSGSGTDFTLTISSVQAEDLAVYYCQN |
| | _xG4_xMSLN_H | | | DYSYPLTFGAGTKLEIKGGGGSGGGGSGGGGS |
| | _x(G4S)3_x | | | EVQLLEQSGAELVRPGTSVKISCKASGYAFTNY |
| | I2Ccc- Full | | | WLGWVKQRPGHGLEWIGDIFPGSGNIHYNEKF |
| | Sequence | | | KGKATLTADKSSSTAYMQLSSLTFEDSAVYFC |
| | | | | ARLRNWDEPMDYWGQGTTVTVSSGGGGSGG |
| | | | | GGSGGGGSEVQLVESGGGLVQPGGSLKLSCAA |
| | | | | SGFTFNKYAMNWVRQAPGKCLEWVARIRSKY |
| | | | | NNYATYYADSVKDRFTISRDDSKNTAYLQMN |
| | | | | NLKTEDTAVYYCVRHGNFGNSYISYWAYWGQ |
| | | | | GTLVTVSSGGGGSGGGGSGGGGSQTVVTQEPS |
| | | | | LTVSPGGTVTLTCGSSTGAVTSGNYPNWVQQK |
| | | | | PGQAPRGLIGGTKFLAPGTPARFSGSLLGGKAA |
| | | | | LTLSGVQPEDEAEYYCVLWYSNRWVFGCGTK |
| | | | | LTVLGGGGDKTHTCPPCPAPELLGGPSVFLFPP |
| | | | | KPKDTLMISRTPEVTCVVVDVSHEDPEVKFNW |
| | | | | YVDGVEVHNAKTKPCEEQYGSTYRCVSVLTV |
| | | | | LHQDWLNGKEYKCKVSNKALPAPIEKTISKAK |
| | | | | GQPREPQVYTLPPSREEMTKNQVSLTCLVKGF |
| | | | | YPSDIAVEWESNGQPENNYKTTPPVLDSDGSFF |
| | | | | LYSKLTVDKSRWQQGNVFSCSVMHEALHNHY |
| | | | | TQKSLSLSPGKGGGGSGGGGSGGGGSGGGGSG |
| | | | | GGGSGGGGSDKTHTCPPCPAPELLGGPSVFLFP |
| | | | | PKPKDTLMISRTPEVTCVVVDVSHEDPEVKEN |
| | | | | WYVDGVEVHNAKTKPCEEQYGSTYRCVSVLT |
| | | | | VLHQDWLNGKEYKCKVSNKALPAPIEKTISKA |
| | | | | KGQPREPQVYTLPPSREEMTKNQVSLTCLVKG |
| | | | | FYPSDIAVEWESNGQPENNYKTTPPVLDSDGSF |
| | | | | FLYSKLTVDKSRWQQGNVFSCSVMHEALHNH |
| | | | | YTQKSLSLSPGKGGGGEVQLLESGGGVVQPGR |
| | | | | SLRLSCAASGFTFSSYGMGWVRQAPGKGLEW |
| | | | | VAVISYDGSNKYYADSVKGRFTISRDNSKNTL |
| | | | | YLQMNSLRAEDTAVYYCAREGAHFGSGSYYP |
| | | | | LYYYYAMDVWGQGTTVTVSSGGGGSGGGGS |
| | | | | GGGGSELTLTQSPGTLSLSPGERATLSCRASQS |
| | | | | VSSSYLAWYQQKPGQAPRLLIYGASIRATGIPD |
| | | | | RFSGSGSGTDFTLTISRLEPEDFAVYYCQQYGS |
| | | | | SPIFTFGPGTKVEIKSGGGGSGGGGSGGGGSEV |
| | | | | QLVESGGGLVQPGGSLKLSCAASGFTFNKYAM |
| | | | | NWVRQAPGKCLEWVARIRSKYNNYATYYADS |
| | | | | VKDRFTISRDDSKNTAYLQMNNLKTEDTAVY |
| | | | | YCVRHGNFGNSYISYWAYWGQGTLVTVSSGG |
| | | | | GGSGGGGSGGGGSQTVVTQEPSLTVSPGGTVT |
| | | | | LTCGSSTGAVTSGNYPNWVQQKPGQAPRGLIG |
| | | | | GTKFLAPGTPARFSGSLLGGKAALTLSGVQPED |
| | | | | EAEYYCVLWYSNRWVFGCGTKLTVL |
| 354. | EpCAM_5-10_x | artificial | aa | ELVMTQSPSSLTVTAGEKVTMSCKSSQSLLNS |
| | I2Ccc_xscFc_xM | | | GNQKNYLTWYQQKPGQPPKLLIYWASTRESG |
| | SLN_H2_x I2Ccc - | | | VPDRFTGSGSGTDFTLTISSVQAEDLAVYYCQN |
| | Full Sequence | | | DYSYPLTFGAGTKLEIKGGGGSGGGGSGGGGS |
| | | | | EVQLLEQSGAELVRPGTSVKISCKASGYAFTNY |
| | | | | WLGWVKQRPGHGLEWIGDIFPGSGNIHYNEKF |
| | | | | KGKATLTADKSSSTAYMQLSSLTFEDSAVYFC |
| | | | | ARLRNWDEPMDYWGQGTTVTVSSGGGGSEV |
| | | | | QLVESGGGLVQPGGSLKLSCAASGFTFNKYAM |
| | | | | NWVRQAPGKCLEWVARIRSKYNNYATYYADS |
| | | | | VKDRFTISRDDSKNTAYLQMNNLKTEDTAVY |
| | | | | YCVRHGNFGNSYISYWAYWGQGTLVTVSSGG |
| | | | | GGSGGGGSGGGGSQTVVTQEPSLTVSPGGTVT |
| | | | | LTCGSSTGAVTSGNYPNWVQQKPGQAPRGLIG |
| | | | | GTKFLAPGTPARFSGSLLGGKAALTLSGVQPED |
| | | | | EAEYYCVLWYSNRWVFGCGTKLTVLDKTHTC |
| | | | | PPCPAPELLGGPSVFLFPPKPKDTLMISRTPEVT |
| | | | | CVVVDVSHEDPEVKFNWYVDGVEVHNAKTKP |
| | | | | CEEQYGSTYRCVSVLTVLHQDWLNGKEYKCK |
| | | | | VSNKALPAPIEKTISKAKGQPREPQVYTLPPSRE |
| | | | | EMTKNQVSLTCLVKGFYPSDIAVEWESNGQPE |
| | | | | NNYKTTPPVLDSDGSFFLYSKLTVDKSRWQQG |
| | | | | NVFSCSVMHEALHNHYTQKSLSLSPGKGGGGS |
| | | | | GGGGSGGGGSGGGGSGGGGSGGGGSDKTHTC |
| | | | | PPCPAPELLGGPSVFLFPPKPKDTLMISRTPEVT |
| | | | | CVVVDVSHEDPEVKFNWYVDGVEVHNAKTKP |
| | | | | CEEQYGSTYRCVSVLTVLHQDWLNGKEYKCK |
| | | | | VSNKALPAPIEKTISKAKGQPREPQVYTLPPSRE |
| | | | | EMTKNQVSLTCLVKGFYPSDIAVEWESNGQPE |
| | | | | NNYKTTPPVLDSDGSFFLYSKLTVDKSRWQQG |
| | | | | NVFSCSVMHEALHNHYTQKSLSLSPGKEVQLL |
| | | | | ESGGGVVQPGRSLRLSCAASGFTFSSYGMGWV |
| | | | | RQAPGKGLEWVAVISYDGSNKYYADSVKGRF |
| | | | | TISRDNSKNTLYLQMNSLRAEDTAVYYCAREG |
| | | | | AHFGSGSYYPLYYYYAMDVWGQGTTVTVSSG |
| | | | | GGGSGGGGSGGGGSELTLTQSPGTLSLSPGERA |
| | | | | TLSCRASQSVSSSYLAWYQQKPGQAPRLLIYG |
| | | | | ASIRATGIPDRFSGSGSGTDFTLTISRLEPEDFAV |
| | | | | YYCQQYGSSPIFTFGPGTKVEIKSGGGGSEVQL |
| | | | | VESGGGLVQPGGSLKLSCAASGFTFNKYAMN |
| | | | | WVRQAPGKCLEWVARIRSKYNNYATYYADSV |
| | | | | KDRFTISRDDSKNTAYLQMNNLKTEDTAVYYC |
| | | | | VRHGNFGNSYISYWAYWGQGTLVTVSSGGGG |
| | | | | SGGGGSGGGGSQTVVTQEPSLTVSPGGTVTLT |
| | | | | CGSSTGAVTSGNYPNWVQQKPGQAPRGLIGGT |
| | | | | KFLAPGTPARFSGSLLGGKAALTLSGVQPEDEA |
| | | | | EYYCVLWYSNRWVFGCGTKLTVL |
| 355. | EpCAM_x(G4S)1 | artificial | Aa | ELVMTQSPSSLTVTAGEKVTMSCKSSQSLLNS |
| | 0_x | | | GNQKNYLTWYQQKPGQPPKLLIYWASTRESG |
| | I2Ccc_xscFc_x | | | VPDRFTGSGSGTDFTLTISSVQAEDLAVYYCQN |
| | I2Ccc_x(G4S)10_ | | | DYSYPLTFGAGTKLEIKGGGGSGGGGSGGGGS |
| | x_MSLN_H2 - | | | EVQLLEQSGAELVRPGTSVKISCKASGYAFTNY |
| | Full Sequence | | | WLGWVKQRPGHGLEWIGDIFPGSGNIHYNEKF |
| | | | | KGKATLTADKSSSTAYMQLSSLTFEDSAVYFC |
| | | | | ARLRNWDEPMDYWGQGTTVTVSSGGGGSGG |
| | | | | GGSGGGGSGGGGSGGGGSGGGGSGGGGSGGG |
| | | | | GSGGGGSGGGGSEVQLVESGGGLVQPGGSLKL |
| | | | | SCAASGFTFNKYAMNWVRQAPGKCLEWVARI |
| | | | | RSKYNNYATYYADSVKDRFTISRDDSKNTAYL |
| | | | | QMNNLKTEDTAVYYCVRHGNFGNSYISYWAY |
| | | | | WGQGTLVTVSSGGGGSGGGGSGGGGSQTVVT |
| | | | | QEPSLTVSPGGTVTLTCGSSTGAVTSGNYPNW |
| | | | | VQQKPGQAPRGLIGGTKFLAPGTPARFSGSLLG |
| | | | | GKAALTLSGVQPEDEAEYYCVLWYSNRWVFG |
| | | | | CGTKLTVLGGGGDKTHTCPPCPAPELLGGPSV |
| | | | | FLFPPKPKDTLMISRTPEVTCVVVDVSHEDPEV |
| | | | | KFNWYVDGVEVHNAKTKPCEEQYGSTYRCVS |
| | | | | VLTVLHQDWLNGKEYKCKVSNKALPAPIEKTI |
| | | | | SKAKGQPREPQVYTLPPSREEMTKNQVSLTCL |
| | | | | VKGFYPSDIAVEWESNGQPENNYKTTPPVLDS |
| | | | | DGSFFLYSKLTVDKSRWQQGNVFSCSVMHEA |
| | | | | LHNHYTQKSLSLSPGKGGGGSGGGGSGGGGS |
| | | | | GGGGSGGGGSGGGGSDKTHTCPPCPAPELLGG |
| | | | | PSVFLFPPKPKDTLMISRTPEVTCVVVDVSHED |
| | | | | PEVKFNWYVDGVEVHNAKTKPCEEQYGSTYR |
| | | | | CVSVLTVLHQDWLNGKEYKCKVSNKALPAPIE |
| | | | | KTISKAKGQPREPQVYTLPPSREEMTKNQVSLT |
| | | | | CLVKGFYPSDIAVEWESNGQPENNYKTTPPVL |
| | | | | DSDGSFFLYSKLTVDKSRWQQGNVFSCSVMHE |
| | | | | ALHNHYTQKSLSLSPGKGGGGEVQLVESGGGL |
| | | | | VQPGGSLKLSCAASGFTFNKYAMNWVRQAPG |
| | | | | KCLEWVARIRSKYNNYATYYADSVKDRFTISR |
| | | | | DDSKNTAYLQMNNLKTEDTAVYYCVRHGNFG |
| | | | | NSYISYWAYWGQGTLVTVSSGGGGSGGGGSG |
| | | | | GGGSQTVVTQEPSLTVSPGGTVTLTCGSSTGA |
| | | | | VTSGNYPNWVQQKPGQAPRGLIGGTKFLAPGT |
| | | | | PARFSGSLLGGKAALTLSGVQPEDEAEYYCVL |
| | | | | WYSNRWVFGCGTKLTVLSGGGGSGGGGSGGG |
| | | | | GSGGGGSGGGGSGGGGSGGGGSGGGGSGGGG |
| | | | | SEVQLLESGGGVVQPGRSLRLSCAASGFTFSSY |
| | | | | GMGWVRQAPGKGLEWVAVISYDGSNKYYAD |
| | | | | SVKGRFTISRDNSKNTLYLQMNSLRAEDTAVY |
| | | | | YCAREGAHFGSGSYYPLYYYYAMDVWGQGT |
| | | | | TVTVSSGGGGSGGGGSGGGGSELTLTQSPGTL |
| | | | | SLSPGERATLSCRASQSVSSSYLAWYQQKPGQ |
| | | | | APRLLIYGASIRATGIPDRFSGSGSGTDFTLTISR |
| | | | | LEPEDFAVYYCQQYGSSPIFTFGPGTKVEIK |
| 356. | CD20_99-E5_CC - | artificial | Aa | SYWMH |
| | HCDR1 | | | |
| 357. | CD20_99-E5_CC - | artificial | Aa | YITPSTGYTEYNQKFKG |
| | HCDR2 | | | |
| 358. | CD20_99-E5_CC - | artificial | Aa | VHDYDRAMEY |
| | HCDR3 | | | |
| 359. | CD20_99-E5_CC - | artificial | Aa | KASQDINKYIA |
| | LCDR1 | | | |
| 360. | CD20_99-E5_CC - | artificial | Aa | YTSTLQP |
| | LCDR2 | | | |
| 361. | CD20_99-E5_CC - | artificial | Aa | LQYASYPFT |
| | LCDR3 | | | |
| 362. | CD20_99-E5_CC - | artificial | Aa | QVQLVQSGAEVKKPGASVKVSCKASGYTFTSY |
| | VH | | | WMHWVRQAPGQCLEWIGYITPSTGYTEYNQK |
| | | | | FKGRVTMTRDKSTSTVYMELSSLTSEDTAVYY |
| | | | | CARVHDYDRAMEYWGQGTTVTVSS |
| 363. | CD20_99-E5_CC - | artificial | Aa | DIQMTQSPSSLSASVGDRVTITCKASQDINKYIA |
| | VL | | | WYQQKPGKGPKLLIYYTSTLQPGVPSRFSGSGS |
| | | | | GTDFTFTISSLQPEDIATYYCLQYASYPFTFGCG |
| | | | | TRLEIK |
| 364. | CD20_99-E5_CC | artificial | aa | EIQMTQSPSSLSASVGDRVTITCKASQDINKYIA |
| | EI - VL | | | WYQQKPGKGPKLLIYYTSTLQPGVPSRFSGSGS |
| | | | | GTDFTFTISSLQPEDIATYYCLQYASYPFTFGCG |
| | | | | TRLEIK |
| 365. | CD22_28- | artificial | aa | SYGIS |
| | B7N655S_CC - | | | |
| | HCDR1 | | | |
| 366. | CD22_28- | artificial | aa | WISAYSGNAIYAQKLQG |
| | B7N655S_CC - | | | |
| | HCDR2 | | | |
| 367. | CD22_28- | artificial | aa | DPDYYGSGSYSDY |
| | B7N655S_CC - | | | |
| | HCDR3 | | | |
| 368. | CD22_28- | artificial | aa | RASQSVSSNLA |
| | B7N655S_CC - | | | |
| | LCDR1 | | | |
| 369. | CD22_28- | artificial | aa | GASSRAT |
| | B7N655S_CC - | | | |
| | LCDR2 | | | |
| 370. | CD22_28- | artificial | aa | QQYHSWPLLT |
| | B7N655S_CC - | | | |
| | LCDR3 | | | |
| 371. | CD22_28- | artificial | aa | QVQLVQSGAEVKKPGASVKVSCKASGYTFTSY |
| | B7N655S_CC - | | | GISWVRQAPGQCLEWMGWISAYSGNAIYAQK |
| | VH | | | LQGRVTMTRDTSTSTAYMELRSLRSDDTAVYY |
| | | | | CARDPDYYGSGSYSDYWGQGTLVTVSS |
| 372. | CD22_28- | artificial | Aa | EIVLTQSPATLSVSPGERATLSCRASQSVSSNLA |
| | B7N655S_CC - | | | WYQQKPGQAPRLLIYGASSRATGIPARFSGSGS |
| | VL | | | GTEFTLTISSLQSEDFAVYYCQQYHSWPLLTFG |
| | | | | CGTKVEIK |
| 373. | CD22_28- | artificial | Aa | QVQLVQSGAEVKKPGASVKVSCKASGYTFTSY |
| | B7N655SCC_x_I | | | GISWVRQAPGQCLEWMGWISAYSGNAIYAQK |
| | 2C_x_(G4S)3_x_s | | | LQGRVTMTRDTSTSTAYMELRSLRSDDTAVYY |
| | cFc_x_(G4S)3_x_ | | | CARDPDYYGSGSYSDYWGQGTLVTVSSGGGG |
| | CD20_99- | | | SGGGGSGGGGSEIVLTQSPATLSVSPGERATLS |
| | E5_CC_x_I2C - | | | CRASQSVSSNLAWYQQKPGQAPRLLIYGASSR |
| | Full Sequence | | | ATGIPARFSGSGSGTEFTLTISSLQSEDFAVYYC |
| | | | | QQYHSWPLLTFGCGTKVEIKSGGGGSEVQLVE |
| | | | | SGGGLVQPGGSLKLSCAASGFTFNKYAMNWV |
| | | | | RQAPGKGLEWVARIRSKYNNYATYYADSVKD |
| | | | | RFTISRDDSKNTAYLQMNNLKTEDTAVYYCVR |
| | | | | HGNFGNSYISYWAYWGQGTLVTVSSGGGGSG |
| | | | | GGGSGGGGSQTVVTQEPSLTVSPGGTVTLTCG |
| | | | | SSTGAVTSGNYPNWVQQKPGQAPRGLIGGTKF |
| | | | | LAPGTPARFSGSLLGGKAALTLSGVQPEDEAE |
| | | | | YYCVLWYSNRWVFGGGTKLTVLGGGGSGGG |
| | | | | GSGGGGSDKTHTCPPCPAPELLGGPSVFLFPPK |
| | | | | PKDTLMISRTPEVTCVVVDVSHEDPEVKFNWY |
| | | | | VDGVEVHNAKTKPCEEQYGSTYRCVSVLTVL |
| | | | | HQDWLNGKEYKCKVSNKALPAPIEKTISKAKG |
| | | | | QPREPQVYTLPPSREEMTKNQVSLTCLVKGFY |
| | | | | PSDIAVEWESNGQPENNYKTTPPVLDSDGSFFL |
| | | | | YSKLTVDKSRWQQGNVFSCSVMHEALHNHYT |
| | | | | QKSLSLSPGKGGGGSGGGGSGGGGSGGGGSG |
| | | | | GGGSGGGGSDKTHTCPPCPAPELLGGPSVFLFP |
| | | | | PKPKDTLMISRTPEVTCVVVDVSHEDPEVKEN |
| | | | | WYVDGVEVHNAKTKPCEEQYGSTYRCVSVLT |
| | | | | VLHQDWLNGKEYKCKVSNKALPAPIEKTISKA |
| | | | | KGQPREPQVYTLPPSREEMTKNQVSLTCLVKG |
| | | | | FYPSDIAVEWESNGQPENNYKTTPPVLDSDGSF |
| | | | | FLYSKLTVDKSRWQQGNVFSCSVMHEALHNH |
| | | | | YTQKSLSLSPGKGGGGSGGGGSGGGGSQVQL |
| | | | | VQSGAEVKKPGASVKVSCKASGYTFTSYWMH |
| | | | | WVRQAPGQCLEWIGYITPSTGYTEYNQKFKGR |
| | | | | VTMTRDKSTSTVYMELSSLTSEDTAVYYCARV |
| | | | | HDYDRAMEYWGQGTTVTVSSGGGGSGGGGS |
| | | | | GGGGSDIQMTQSPSSLSASVGDRVTITCKASQD |
| | | | | INKYIAWYQQKPGKGPKLLIYYTSTLQPGVPSR |
| | | | | FSGSGSGTDFTFTISSLQPEDIATYYCLQYASYP |
| | | | | FTFGCGTRLEIKSGGGGSEVQLVESGGGLVQPG |
| | | | | GSLKLSCAASGFTFNKYAMNWVRQAPGKGLE |
| | | | | WVARIRSKYNNYATYYADSVKDRFTISRDDSK |
| | | | | NTAYLQMNNLKTEDTAVYYCVRHGNFGNSYI |
| | | | | SYWAYWGQGTLVTVSSGGGGSGGGGSGGGG |
| | | | | SQTVVTQEPSLTVSPGGTVTLTCGSSTGAVTSG |
| | | | | NYPNWVQQKPGQAPRGLIGGTKFLAPGTPARF |
| | | | | SGSLLGGKAALTLSGVQPEDEAEYYCVLWYSN |
| | | | | RWVFGGGTKLTVL |
| 374. | CD22_28- | artificial | Aa | QVQLVQSGAEVKKPGASVKVSCKASGYTFTSY |
| | B7_N655S_CC_x | | | GISWVRQAPGQCLEWMGWISAYSGNAIYAQK |
| | I2E_x_(G4Q)3_x | | | LQGRVTMTRDTSTSTAYMELRSLRSDDTAVYY |
| | scFc_x_(G4Q)3x | | | CARDPDYYGSGSYSDYWGQGTLVTVSSGGGG |
| | CD20_99- | | | QGGGGQGGGGQEIVLTQSPATLSVSPGERATL |
| | E5_CC_x_I2E_EI | | | SCRASQSVSSNLAWYQQKPGQAPRLLIYGASS |
| | mod - Full | | | RATGIPARFSGSGSGTEFTLTISSLQSEDFAVYY |
| | Sequence | | | CQQYHSWPLLTFGCGTKVEIKSGGGGQEVQLV |
| | | | | ESGGGLVQPGGSLKLSCAASGFTFNKYAINWV |
| | | | | RQAPGKGLEWVARIRSKYNNYATYYADAVKD |
| | | | | RFTISRDDSKNTVYLQMNNLKTEDTAVYYCAR |
| | | | | AGNFGSSYISYWAYWGQGTLVTVSSGGGGQG |
| | | | | GGGQGGGGQQTVVTQEPSLTVSPGGTVTITCG |
| | | | | SSTGAVTSGNYPNWVQKKPGQAPRGLIGGTKF |
| | | | | LAPGTPARFSGSLSGGKAALTLSGVQPEDEAEY |
| | | | | YCVLWYSNRWVFGSGTKLTVLGGGGQGGGG |
| | | | | QGGGGQCPPCPAPELLGGPSVFLFPPKPKDTLM |
| | | | | ISRTPEVTCVVVDVSHEEPEVKFNWYVDGVEV |
| | | | | HNAKTKPCEEQYGSTYRCVSVLTVLHQDWLN |
| | | | | GKEYKCKVSNKALPAPIEKTISKAKGQPREPQV |
| | | | | YTLPPSREEMTKNQVSLTCLVKGFYPSDIAVE |
| | | | | WESNGQPENNYKTTPPVLDSDGSFFLYSKLTV |
| | | | | DKSRWQQGNVFSCSVMHEALHNHYTQKSLSL |
| | | | | SPGKGGGGQGGGGQGGGGQGGGGQGGGGQG |
| | | | | GGGQCPPCPAPELLGGPSVFLFPPKPKDTLMIS |
| | | | | RTPEVTCVVVDVSHEEPEVKFNWYVDGVEVH |
| | | | | NAKTKPCEEQYGSTYRCVSVLTVLHQDWLNG |
| | | | | KEYKCKVSNKALPAPIEKTISKAKGQPREPQVY |
| | | | | TLPPSREEMTKNQVSLTCLVKGFYPSDIAVEWE |
| | | | | SNGQPENNYKTTPPVLDSDGSFFLYSKLTVDKS |
| | | | | RWQQGNVFSCSVMHEALHNHYTQKSLSLSPG |
| | | | | KGGGGQGGGGQGGGGQQVQLVQSGAEVKKP |
| | | | | GASVKVSCKASGYTFTSYWMHWVRQAPGQC |
| | | | | LEWIGYITPSTGYTEYNQKFKGRVTMTRDKST |
| | | | | STVYMELSSLTSEDTAVYYCARVHDYDRAME |
| | | | | YWGQGTTVTVSSGGGGQGGGGQGGGGQEIQ |
| | | | | MTQSPSSLSASVGDRVTITCKASQDINKYIAWY |
| | | | | QQKPGKGPKLLIYYTSTLQPGVPSRFSGSGSGT |
| | | | | DFTFTISSLQPEDIATYYCLQYASYPFTFGCGTR |
| | | | | LEIKSGGGGQEVQLVESGGGLVQPGGSLKLSC |
| | | | | AASGFTFNKYAINWVRQAPGKGLEWVARIRSK |
| | | | | YNNYATYYADAVKDRFTISRDDSKNTVYLQM |
| | | | | NNLKTEDTAVYYCARAGNFGSSYISYWAYWG |
| | | | | QGTLVTVSSGGGGQGGGGQGGGGQQTVVTQE |
| | | | | PSLTVSPGGTVTITCGSSTGAVTSGNYPNWVQ |
| | | | | KKPGQAPRGLIGGTKFLAPGTPARFSGSLSGGK |
| | | | | AALTLSGVQPEDEAEYYCVLWYSNRWVFGSG |
| | | | | TKLTVL |
| 375. | CD22_28- | artificial | Aa | QVQLVQSGAEVKKPGASVKVSCKASGYTFTSY |
| | B7_N655S_CC_x | | | GISWVRQAPGQCLEWMGWISAYSGNAIYAQK |
| | I2E_x_G4_x_sc | | | LQGRVTMTRDTSTSTAYMELRSLRSDDTAVYY |
| | Fc_x_G4_x_CD2 | | | CARDPDYYGSGSYSDYWGQGTLVTVSSGGGG |
| | 0_99- | | | QGGGGQGGGGQEIVLTQSPATLSVSPGERATL |
| | E5_CC_x_I2E_G | | | SCRASQSVSSNLAWYQQKPGQAPRLLIYGASS |
| | Q_EImod - Full | | | RATGIPARFSGSGSGTEFTLTISSLQSEDFAVYY |
| | Sequence | | | CQQYHSWPLLTFGCGTKVEIKSGGGGQEVQLV |
| | | | | ESGGGLVQPGGSLKLSCAASGFTFNKYAINWV |
| | | | | RQAPGKGLEWVARIRSKYNNYATYYADAVKD |
| | | | | RFTISRDDSKNTVYLQMNNLKTEDTAVYYCAR |
| | | | | AGNFGSSYISYWAYWGQGTLVTVSSGGGGQG |
| | | | | GGGQGGGGQQTVVTQEPSLTVSPGGTVTITCG |
| | | | | SSTGAVTSGNYPNWVQKKPGQAPRGLIGGTKF |
| | | | | LAPGTPARFSGSLSGGKAALTLSGVQPEDEAEY |
| | | | | YCVLWYSNRWVFGSGTKLTVLGGGGCPPCPA |
| | | | | PELLGGPSVFLFPPKPKDTLMISRTPEVTCVVV |
| | | | | DVSHEEPEVKFNWYVDGVEVHNAKTKPCEEQ |
| | | | | YGSTYRCVSVLTVLHQDWLNGKEYKCKVSNK |
| | | | | ALPAPIEKTISKAKGQPREPQVYTLPPSREEMT |
| | | | | KNQVSLTCLVKGFYPSDIAVEWESNGQPENNY |
| | | | | KTTPPVLDSDGSFFLYSKLTVDKSRWQQGNVF |
| | | | | SCSVMHEALHNHYTQKSLSLSPGKGGGGQGG |
| | | | | GGQGGGGQGGGGQGGGGQGGGGQCPPCPAP |
| | | | | ELLGGPSVFLFPPKPKDTLMISRTPEVTCVVVD |
| | | | | VSHEEPEVKFNWYVDGVEVHNAKTKPCEEQY |
| | | | | GSTYRCVSVLTVLHQDWLNGKEYKCKVSNKA |
| | | | | LPAPIEKTISKAKGQPREPQVYTLPPSREEMTK |
| | | | | NQVSLTCLVKGFYPSDIAVEWESNGQPENNYK |
| | | | | TTPPVLDSDGSFFLYSKLTVDKSRWQQGNVFS |
| | | | | CSVMHEALHNHYTQKSLSLSPGKGGGGQVQL |
| | | | | VQSGAEVKKPGASVKVSCKASGYTFTSYWMH |
| | | | | WVRQAPGQCLEWIGYITPSTGYTEYNQKFKGR |
| | | | | VTMTRDKSTSTVYMELSSLTSEDTAVYYCARV |
| | | | | HDYDRAMEYWGQGTTVTVSSGGGGQGGGGQ |
| | | | | GGGGQEIQMTQSPSSLSASVGDRVTITCKASQD |
| | | | | INKYIAWYQQKPGKGPKLLIYYTSTLQPGVPSR |
| | | | | FSGSGSGTDFTFTISSLQPEDIATYYCLQYASYP |
| | | | | FTFGCGTRLEIKSGGGGQEVQLVESGGGLVQP |
| | | | | GGSLKLSCAASGFTFNKYAINWVRQAPGKGLE |
| | | | | WVARIRSKYNNYATYYADAVKDRFTISRDDSK |
| | | | | NTVYLQMNNLKTEDTAVYYCARAGNFGSSYIS |
| | | | | YWAYWGQGTLVTVSSGGGGQGGGGQGGGGQ |
| | | | | QTVVTQEPSLTVSPGGTVTITCGSSTGAVTSGN |
| | | | | YPNWVQKKPGQAPRGLIGGTKFLAPGTPARFS |
| | | | | GSLSGGKAALTLSGVQPEDEAEYYCVLWYSN |
| | | | | RWVFGSGTKLTVL |
| 376. | CL1 9-G4 CC - | artificial | Aa | DYYMH |
| | HCDR1 | | | |
| 377. | CL1 9-G4 CC - | artificial | Aa | WINPNSGGPNYAQKFQG |
| | HCDR2 | | | |
| 378. | CL1 9-G4 CC - | artificial | Aa | EKHAVAGIGFDY |
| | HCDR3 | | | |
| 379. | CL1 9-G4 CC - | artificial | Aa | QASQDISNYLN |
| | LCDR1 | | | |
| 380. | CL1 9-G4 CC - | artificial | Aa | AASSLES |
| | LCDR2 | | | |
| 381. | CL1 9-G4 CC - | artificial | aa | QQANSFPLT |
| | LCDR3 | | | |
| 382. | CL1 9-G4 CC - | artificial | aa | QVQLVQSGAEVKKPGASVKVSCKASGYTFTD |
| | VH | | | YYMHWVRQAPGQCLEWMGWINPNSGGPNYA |
| | | | | QKFQGRVTMTRDTSISTAHMELSRLRSDDTAV |
| | | | | YYCAREKHAVAGIGFDYWGQGTLVTVSS |
| 383. | CL1 9-G4 CC - | artificial | aa | DIQMTQSPSSVSASVGDRVTITCQASQDISNYL |
| | VL | | | NWYQQKPGKAPKLLIYAASSLESGVPSRFSGS |
| | | | | GSGTDFTLTISSLQPEDFATYYCQQANSFPLTFG |
| | | | | CGTKVDIK |
| 384. | CL1 9-G4 CC EI - | artificial | aa | EIQMTQSPSSVSASVGDRVTITCQASQDISNYL |
| | VL | | | NWYQQKPGKAPKLLIYAASSLESGVPSRFSGS |
| | | | | GSGTDFTLTISSLQPEDFATYYCQQANSFPLTFG |
| | | | | CGTKVDIK |
| 385. | FL 4-E9 CC - | artificial | aa | NARMGVS |
| | HCDR1 | | | |
| 386. | FL 4-E9 CC - | artificial | aa | HIFSNDEKSYSTSLKS |
| | HCDR2 | | | |
| 387. | FL 4-E9 CC - | artificial | aa | VPEYSSGWYRFDY |
| | HCDR3 | | | |
| 388. | FL 4-E9 CC - | artificial | aa | RASQSIRSYLN |
| | LCDR1 | | | |
| 389. | FL 4-E9 CC - | artificial | Aa | ATSSLQG |
| | LCDR2 | | | |
| 390. | FL 4-E9 CC - | artificial | Aa | QQSYSTPFT |
| | LCDR3 | | | |
| 391. | FL 4-E9 CC - VH | artificial | Aa | QVTLKESGPTLVKPTETLTLTCTVSGFSFRNAR |
| | | | | MGVSWIRQPPGKCLEWLAHIFSNDEKSYSTSL |
| | | | | KSRLTISKDTSKSQVVLTMTNMDPVDTATYFC |
| | | | | ARVPEYSSGWYRFDYWGQGTLVTVSS |
| 392. | FL 4-E9 CC - VL | artificial | Aa | DIQMTQSPSSLSASVGDRVTISCRASQSIRSYLN |
| | | | | WYQQKPGKAPKLLIYATSSLQGGVPSRFSGSG |
| | | | | SGTDFTLTISSLQPEDFATYYCQQSYSTPFTFGC |
| | | | | GTKVEIK |
| 393. | FL 4-E9 CC EI - | artificial | Aa | EIQMTQSPSSLSASVGDRVTISCRASQSIRSYLN |
| | VL | | | WYQQKPGKAPKLLIYATSSLQGGVPSRFSGSG |
| | | | | SGTDFTLTISSLQPEDFATYYCQQSYSTPFTFGC |
| | | | | GTKVEIK |
| 394. | CL1 9-G4 CC | artificial | Aa | QVQLVQSGAEVKKPGASVKVSCKASGYTFTD |
| | x4F10.03 scFc | | | YYMHWVRQAPGQCLEWMGWINPNSGGPNYA |
| | xFL 4-E9 CC | | | QKFQGRVTMTRDTSISTAHMELSRLRSDDTAV |
| | x4F10.03 mut - | | | YYCAREKHAVAGIGFDYWGQGTLVTVSSGGG |
| | Full Sequence | | | GSGGGGSGGGGSDIQMTQSPSSVSASVGDRVTI |
| | | | | TCQASQDISNYLNWYQQKPGKAPKLLIYAASS |
| | | | | LESGVPSRFSGSGSGTDFTLTISSLQPEDFATYY |
| | | | | CQQANSFPLTFGCGTKVDIKSGGGGSEVQLVE |
| | | | | SGGGLVQPGGSLKLSCAASGFTFNKYAMNWV |
| | | | | RQAPGKGMEWVARIRSKYNNYATYYADAVK |
| | | | | DRFTISRDDSKNTLYLQMNNLKTEDTAVYYCV |
| | | | | RAGNFGKSYISYWAYWGQGTLVTVSSGGGGS |
| | | | | GGGGSGGGGSQTVVTQEPSLTVSPGGTVTITC |
| | | | | GSSTGAVTSGNYPNWVQKKPGQAPRGLIGGTK |
| | | | | FLAPGTPARFSGSLSGGKAALTLSGVQPEDEAE |
| | | | | YYCVLWYSNRWVFGSGTKLTVLGGGGSGGG |
| | | | | GSGGGGSDKTHTCPPCPAPELLGGPSVFLFPPK |
| | | | | PKDTLMISRTPEVTCVVVDVSHEDPEVKFNWY |
| | | | | VDGVEVHNAKTKPCEEQYGSTYRCVSVLTVL |
| | | | | HQDWLNGKEYKCKVSNKALPAPIEKTISKAKG |
| | | | | QPREPQVYTLPPSREEMTKNQVSLTCLVKGFY |
| | | | | PSDIAVEWESNGQPENNYKTTPPVLDSDGSFFL |
| | | | | YSKLTVDKSRWQQGNVFSCSVMHEALHNHYT |
| | | | | QKSLSLSPGKGGGGSGGGGSGGGGSGGGGSG |
| | | | | GGGSGGGGSDKTHTCPPCPAPELLGGPSVFLFP |
| | | | | PKPKDTLMISRTPEVTCVVVDVSHEDPEVKEN |
| | | | | WYVDGVEVHNAKTKPCEEQYGSTYRCVSVLT |
| | | | | VLHQDWLNGKEYKCKVSNKALPAPIEKTISKA |
| | | | | KGQPREPQVYTLPPSREEMTKNQVSLTCLVKG |
| | | | | FYPSDIAVEWESNGQPENNYKTTPPVLDSDGSF |
| | | | | FLYSKLTVDKSRWQQGNVFSCSVMHEALHNH |
| | | | | YTQKSLSLSPGKGGGGSGGGGSGGGGSQVTLK |
| | | | | ESGPTLVKPTETLTLTCTVSGFSFRNARMGVS |
| | | | | WIRQPPGKCLEWLAHIFSNDEKSYSTSLKSRLTI |
| | | | | SKDTSKSQVVLTMTNMDPVDTATYFCARVPE |
| | | | | YSSGWYRFDYWGQGTLVTVSSGGGGSGGGGS |
| | | | | GGGGSDIQMTQSPSSLSASVGDRVTISCRASQSI |
| | | | | RSYLNWYQQKPGKAPKLLIYATSSLQGGVPSR |
| | | | | FSGSGSGTDFTLTISSLQPEDFATYYCQQSYSTP |
| | | | | FTFGCGTKVEIKSGGGGSEVQLVESGGGLVQP |
| | | | | GGSLKLSCAASGFTFNKYAMNWVRQAPGKG |
| | | | | MEWVARIRSKYNNYATYYADAVKDRFTISRD |
| | | | | DSKNTLYLQMNNLKTEDTAVYYCVRAGNFGK |
| | | | | SYISYWAYWGQGTLVTVSSGGGGSGGGGSGG |
| | | | | GGSQTVVTQEPSLTVSPGGTVTITCGSSTGAVT |
| | | | | SGNYPNWVQKKPGQAPRGLIGGTKFLAPGTPA |
| | | | | RFSGSLSGGKAALTLSGVQPEDEAEYYCVLWY |
| | | | | SNRWVFGSGTKLTVL |
| 395. | CL1 9-G4 CC | artificial | Aa | QVQLVQSGAEVKKPGASVKVSCKASGYTFTD |
| | x4G10.04x scFc | | | YYMHWVRQAPGQCLEWMGWINPNSGGPNYA |
| | xFL 4-E9 CC | | | QKFQGRVTMTRDTSISTAHMELSRLRSDDTAV |
| | x4G10.04 - Full | | | YYCAREKHAVAGIGFDYWGQGTLVTVSSGGG |
| | Sequence | | | GSGGGGSGGGGSDIQMTQSPSSVSASVGDRVTI |
| | | | | TCQASQDISNYLNWYQQKPGKAPKLLIYAASS |
| | | | | LESGVPSRFSGSGSGTDFTLTISSLQPEDFATYY |
| | | | | CQQANSFPLTFGCGTKVDIKSGGGGSEVQLVE |
| | | | | SGGGLVQPGGSLKLSCAASGFTFSKYAMNWV |
| | | | | REAPGKGLEWVARIRSKYNNYATYYAEAVKD |
| | | | | RFTISRDDSKNTVYLQMNNLKTEDTAVYYCVR |
| | | | | AENIGKSYISYWAYWGQGTLVTVSSGGGGSG |
| | | | | GGGSGGGGSQTVVTQEPSLTVSPGGTVTMTCG |
| | | | | SSTGAVTSGNYPNWVQKKPGQAPRGLIGGTKF |
| | | | | LAPGTPARFSGSLEGGKAALTLSGVQPEDEAE |
| | | | | YYCVLWYSNRWVFGGGTKLTVLGGGGSGGG |
| | | | | GSGGGGSDKTHTCPPCPAPELLGGPSVFLFPPK |
| | | | | PKDTLMISRTPEVTCVVVDVSHEDPEVKFNWY |
| | | | | VDGVEVHNAKTKPCEEQYGSTYRCVSVLTVL |
| | | | | HQDWLNGKEYKCKVSNKALPAPIEKTISKAKG |
| | | | | QPREPQVYTLPPSREEMTKNQVSLTCLVKGFY |
| | | | | PSDIAVEWESNGQPENNYKTTPPVLDSDGSFFL |
| | | | | YSKLTVDKSRWQQGNVFSCSVMHEALHNHYT |
| | | | | QKSLSLSPGKGGGGSGGGGSGGGGSGGGGSG |
| | | | | GGGSGGGGSDKTHTCPPCPAPELLGGPSVFLFP |
| | | | | PKPKDTLMISRTPEVTCVVVDVSHEDPEVKEN |
| | | | | WYVDGVEVHNAKTKPCEEQYGSTYRCVSVLT |
| | | | | VLHQDWLNGKEYKCKVSNKALPAPIEKTISKA |
| | | | | KGQPREPQVYTLPPSREEMTKNQVSLTCLVKG |
| | | | | FYPSDIAVEWESNGQPENNYKTTPPVLDSDGSF |
| | | | | FLYSKLTVDKSRWQQGNVFSCSVMHEALHNH |
| | | | | YTQKSLSLSPGKGGGGSGGGGSGGGGSQVTLK |
| | | | | ESGPTLVKPTETLTLTCTVSGFSFRNARMGVS |
| | | | | WIRQPPGKCLEWLAHIFSNDEKSYSTSLKSRLTI |
| | | | | SKDTSKSQVVLTMTNMDPVDTATYFCARVPE |
| | | | | YSSGWYRFDYWGQGTLVTVSSGGGGSGGGGS |
| | | | | GGGGSDIQMTQSPSSLSASVGDRVTISCRASQSI |
| | | | | RSYLNWYQQKPGKAPKLLIYATSSLQGGVPSR |
| | | | | FSGSGSGTDFTLTISSLQPEDFATYYCQQSYSTP |
| | | | | FTFGCGTKVEIKSGGGGSEVQLVESGGGLVQP |
| | | | | GGSLKLSCAASGFTFSKYAMNWVREAPGKGL |
| | | | | EWVARIRSKYNNYATYYAEAVKDRFTISRDDS |
| | | | | KNTVYLQMNNLKTEDTAVYYCVRAENIGKSYI |
| | | | | SYWAYWGQGTLVTVSSGGGGSGGGGSGGGG |
| | | | | SQTVVTQEPSLTVSPGGTVTMTCGSSTGAVTS |
| | | | | GNYPNWVQKKPGQAPRGLIGGTKFLAPGTPAR |
| | | | | FSGSLEGGKAALTLSGVQPEDEAEYYCVLWYS |
| | | | | NRWVFGGGTKLTVL |
| 396. | CL1 9-G4 CC | artificial | Aa | QVQLVQSGAEVKKPGASVKVSCKASGYTFTD |
| | x5B1.05 x scFc | | | YYMHWVRQAPGQCLEWMGWINPNSGGPNYA |
| | xFL 4-E9 CC | | | QKFQGRVTMTRDTSISTAHMELSRLRSDDTAV |
| | x5B1.05 - Full | | | YYCAREKHAVAGIGFDYWGQGTLVTVSSGGG |
| | Sequence | | | GSGGGGSGGGGSDIQMTQSPSSVSASVGDRVTI |
| | | | | TCQASQDISNYLNWYQQKPGKAPKLLIYAASS |
| | | | | LESGVPSRFSGSGSGTDFTLTISSLQPEDFATYY |
| | | | | CQQANSFPLTFGCGTKVDIKSGGGGSEVQLVE |
| | | | | SGGGLVQPGGSLKLSCAASGFTFSKYAMNWV |
| | | | | RQAPGKGMEWVARIRSKYNNYATYYAEAVK |
| | | | | GRFTISRDDSKNTVYLQMNNLKTEDTAVYYCV |
| | | | | RAGNFGSSYISYWAYWGQGTLVTVSSGGGGS |
| | | | | GGGGSGGGGSQTVVTQEPSLTVSPGGTVTLTC |
| | | | | GSSTGAVTSGNYPNWVQKKPGQAPRGLIGGTK |
| | | | | FLAPGTPARFSGSLSGGKAALTLSGVQPEDEAE |
| | | | | YYCVLWYSNRWVFGGGTKLTVLGGGGSGGG |
| | | | | GSGGGGSDKTHTCPPCPAPELLGGPSVFLFPPK |
| | | | | PKDTLMISRTPEVTCVVVDVSHEDPEVKFNWY |
| | | | | VDGVEVHNAKTKPCEEQYGSTYRCVSVLTVL |
| | | | | HQDWLNGKEYKCKVSNKALPAPIEKTISKAKG |
| | | | | QPREPQVYTLPPSREEMTKNQVSLTCLVKGFY |
| | | | | PSDIAVEWESNGQPENNYKTTPPVLDSDGSFFL |
| | | | | YSKLTVDKSRWQQGNVFSCSVMHEALHNHYT |
| | | | | QKSLSLSPGKGGGGSGGGGSGGGGSGGGGSG |
| | | | | GGGSGGGGSDKTHTCPPCPAPELLGGPSVFLFP |
| | | | | PKPKDTLMISRTPEVTCVVVDVSHEDPEVKEN |
| | | | | WYVDGVEVHNAKTKPCEEQYGSTYRCVSVLT |
| | | | | VLHQDWLNGKEYKCKVSNKALPAPIEKTISKA |
| | | | | KGQPREPQVYTLPPSREEMTKNQVSLTCLVKG |
| | | | | FYPSDIAVEWESNGQPENNYKTTPPVLDSDGSF |
| | | | | FLYSKLTVDKSRWQQGNVFSCSVMHEALHNH |
| | | | | YTQKSLSLSPGKGGGGSGGGGSGGGGSQVTLK |
| | | | | ESGPTLVKPTETLTLTCTVSGFSFRNARMGVS |
| | | | | WIRQPPGKCLEWLAHIFSNDEKSYSTSLKSRLTI |
| | | | | SKDTSKSQVVLTMTNMDPVDTATYFCARVPE |
| | | | | YSSGWYRFDYWGQGTLVTVSSGGGGSGGGGS |
| | | | | GGGGSDIQMTQSPSSLSASVGDRVTISCRASQSI |
| | | | | RSYLNWYQQKPGKAPKLLIYATSSLQGGVPSR |
| | | | | FSGSGSGTDFTLTISSLQPEDFATYYCQQSYSTP |
| | | | | FTFGCGTKVEIKSGGGGSEVQLVESGGGLVQP |
| | | | | GGSLKLSCAASGFTFSKYAMNWVRQAPGKGM |
| | | | | EWVARIRSKYNNYATYYAEAVKGRFTISRDDS |
| | | | | KNTVYLQMNNLKTEDTAVYYCVRAGNFGSSY |
| | | | | ISYWAYWGQGTLVTVSSGGGGSGGGGSGGGG |
| | | | | SQTVVTQEPSLTVSPGGTVTLTCGSSTGAVTSG |
| | | | | NYPNWVQKKPGQAPRGLIGGTKFLAPGTPARF |
| | | | | SGSLSGGKAALTLSGVQPEDEAEYYCVLWYSN |
| | | | | RWVFGGGTKLTVL |
| 397. | CL1 9-G4 CC | artificial | Aa | QVQLVQSGAEVKKPGASVKVSCKASGYTFTD |
| | x5B1.09 x scFc | | | YYMHWVRQAPGQCLEWMGWINPNSGGPNYA |
| | xFL 4-E9 CC | | | QKFQGRVTMTRDTSISTAHMELSRLRSDDTAV |
| | xH5B1.09 - Full | | | YYCAREKHAVAGIGFDYWGQGTLVTVSSGGG |
| | Sequence | | | GSGGGGSGGGGSDIQMTQSPSSVSASVGDRVTI |
| | | | | TCQASQDISNYLNWYQQKPGKAPKLLIYAASS |
| | | | | LESGVPSRFSGSGSGTDFTLTISSLQPEDFATYY |
| | | | | CQQANSFPLTFGCGTKVDIKSGGGGSEVQLVE |
| | | | | SGGGLVQPGGSLKLSCAASGFTFSKYAMNWV |
| | | | | RQAPGKGMEWVARIRSKYNNYATYYADAVK |
| | | | | GRFTISRDDSKNTVYLQMNNLKTEDTAVYYCV |
| | | | | RAGNFGKSYISYFAYWGQGTLVTVSSGGGGSG |
| | | | | GGGSGGGGSQTVVTQEPSLTVSPGGTVTLTCG |
| | | | | SSTGAVTSGNYPNWVQKKPGQAPRGLIGGTKF |
| | | | | LAPGTPARFSGSLSGGKAALTLSGVQPEDEAEY |
| | | | | YCVLYYSNRWVFGGGTKLTVLGGGGSGGGGS |
| | | | | GGGGSDKTHTCPPCPAPELLGGPSVFLFPPKPK |
| | | | | DTLMISRTPEVTCVVVDVSHEDPEVKFNWYVD |
| | | | | GVEVHNAKTKPCEEQYGSTYRCVSVLTVLHQ |
| | | | | DWLNGKEYKCKVSNKALPAPIEKTISKAKGQP |
| | | | | REPQVYTLPPSREEMTKNQVSLTCLVKGFYPS |
| | | | | DIAVEWESNGQPENNYKTTPPVLDSDGSFFLYS |
| | | | | KLTVDKSRWQQGNVFSCSVMHEALHNHYTQK |
| | | | | SLSLSPGKGGGGSGGGGSGGGGSGGGGSGGG |
| | | | | GSGGGGSDKTHTCPPCPAPELLGGPSVFLFPPK |
| | | | | PKDTLMISRTPEVTCVVVDVSHEDPEVKFNWY |
| | | | | VDGVEVHNAKTKPCEEQYGSTYRCVSVLTVL |
| | | | | HQDWLNGKEYKCKVSNKALPAPIEKTISKAKG |
| | | | | QPREPQVYTLPPSREEMTKNQVSLTCLVKGFY |
| | | | | PSDIAVEWESNGQPENNYKTTPPVLDSDGSFFL |
| | | | | YSKLTVDKSRWQQGNVFSCSVMHEALHNHYT |
| | | | | QKSLSLSPGKGGGGSGGGGSGGGGSQVTLKES |
| | | | | GPTLVKPTETLTLTCTVSGFSFRNARMGVSWIR |
| | | | | QPPGKCLEWLAHIFSNDEKSYSTSLKSRLTISK |
| | | | | DTSKSQVVLTMTNMDPVDTATYFCARVPEYSS |
| | | | | GWYRFDYWGQGTLVTVSSGGGGSGGGGSGG |
| | | | | GGSDIQMTQSPSSLSASVGDRVTISCRASQSIRS |
| | | | | YLNWYQQKPGKAPKLLIYATSSLQGGVPSRFS |
| | | | | GSGSGTDFTLTISSLQPEDFATYYCQQSYSTPFT |
| | | | | FGCGTKVEIKSGGGGSEVQLVESGGGLVQPGG |
| | | | | SLKLSCAASGFTFSKYAMNWVRQAPGKGMEW |
| | | | | VARIRSKYNNYATYYADAVKGRFTISRDDSKN |
| | | | | TVYLQMNNLKTEDTAVYYCVRAGNFGKSYIS |
| | | | | YFAYWGQGTLVTVSSGGGGSGGGGSGGGGSQ |
| | | | | TVVTQEPSLTVSPGGTVTLTCGSSTGAVTSGNY |
| | | | | PNWVQKKPGQAPRGLIGGTKFLAPGTPARFSG |
| | | | | SLSGGKAALTLSGVQPEDEAEYYCVLYYSNR |
| | | | | WVFGGGTKLTVL |
| 398. | CL1 9-G4 CC | artificial | aa | QVQLVQSGAEVKKPGASVKVSCKASGYTFTD |
| | x6H10.03x scFc | | | YYMHWVRQAPGQCLEWMGWINPNSGGPNYA |
| | xFL 4-E9 CC x | | | QKFQGRVTMTRDTSISTAHMELSRLRSDDTAV |
| | 6H10.03 - Full | | | YYCAREKHAVAGIGFDYWGQGTLVTVSSGGG |
| | Sequence | | | GSGGGGSGGGGSDIQMTQSPSSVSASVGDRVTI |
| | | | | TCQASQDISNYLNWYQQKPGKAPKLLIYAASS |
| | | | | LESGVPSRFSGSGSGTDFTLTISSLQPEDFATYY |
| | | | | CQQANSFPLTFGCGTKVDIKSGGGGSEVQLVE |
| | | | | SGGGLVQPGGSLKLSCAASGFTFNKYAMNWV |
| | | | | RQAPGKGMEWVARIRSKYNNYATYYAEAVK |
| | | | | DRFTISRDDSKNTLYLQMNNLKTEDTAVYYCV |
| | | | | RAGNFGKSYISYWAYWGQGTLVTVSSGGGGS |
| | | | | GGGGSGGGGSQTVVTQEPSLTVSPGGTVTITC |
| | | | | GSSTGAVTSGNYPNWIQKKPGQAPRGLIGGTK |
| | | | | FLAPGTPARFSGSLEGGKAALTLSGVQPEDEAE |
| | | | | YYCVLWYSNRWVFGSGTKLTVLGGGGSGGG |
| | | | | GSGGGGSDKTHTCPPCPAPELLGGPSVFLFPPK |
| | | | | PKDTLMISRTPEVTCVVVDVSHEDPEVKFNWY |
| | | | | VDGVEVHNAKTKPCEEQYGSTYRCVSVLTVL |
| | | | | HQDWLNGKEYKCKVSNKALPAPIEKTISKAKG |
| | | | | QPREPQVYTLPPSREEMTKNQVSLTCLVKGFY |
| | | | | PSDIAVEWESNGQPENNYKTTPPVLDSDGSFFL |
| | | | | YSKLTVDKSRWQQGNVFSCSVMHEALHNHYT |
| | | | | QKSLSLSPGKGGGGSGGGGSGGGGSGGGGSG |
| | | | | GGGSGGGGSDKTHTCPPCPAPELLGGPSVFLFP |
| | | | | PKPKDTLMISRTPEVTCVVVDVSHEDPEVKEN |
| | | | | WYVDGVEVHNAKTKPCEEQYGSTYRCVSVLT |
| | | | | VLHQDWLNGKEYKCKVSNKALPAPIEKTISKA |
| | | | | KGQPREPQVYTLPPSREEMTKNQVSLTCLVKG |
| | | | | FYPSDIAVEWESNGQPENNYKTTPPVLDSDGSF |
| | | | | FLYSKLTVDKSRWQQGNVFSCSVMHEALHNH |
| | | | | YTQKSLSLSPGKGGGGSGGGGSGGGGSQVTLK |
| | | | | ESGPTLVKPTETLTLTCTVSGFSFRNARMGVS |
| | | | | WIRQPPGKCLEWLAHIFSNDEKSYSTSLKSRLTI |
| | | | | SKDTSKSQVVLTMTNMDPVDTATYFCARVPE |
| | | | | YSSGWYRFDYWGQGTLVTVSSGGGGSGGGGS |
| | | | | GGGGSDIQMTQSPSSLSASVGDRVTISCRASQSI |
| | | | | RSYLNWYQQKPGKAPKLLIYATSSLQGGVPSR |
| | | | | FSGSGSGTDFTLTISSLQPEDFATYYCQQSYSTP |
| | | | | FTFGCGTKVEIKSGGGGSEVQLVESGGGLVQP |
| | | | | GGSLKLSCAASGFTFNKYAMNWVRQAPGKG |
| | | | | MEWVARIRSKYNNYATYYAEAVKDRFTISRD |
| | | | | DSKNTLYLQMNNLKTEDTAVYYCVRAGNFGK |
| | | | | SYISYWAYWGQGTLVTVSSGGGGSGGGGSGG |
| | | | | GGSQTVVTQEPSLTVSPGGTVTITCGSSTGAVT |
| | | | | SGNYPNWIQKKPGQAPRGLIGGTKFLAPGTPA |
| | | | | RFSGSLEGGKAALTLSGVQPEDEAEYYCVLWY |
| | | | | SNRWVFGSGTKLTVL |
| 399. | CL1 9-G4 CC | artificial | aa | QVQLVQSGAEVKKPGASVKVSCKASGYTFTD |
| | x6H10.09 x scFc | | | YYMHWVRQAPGQCLEWMGWINPNSGGPNYA |
| | xFL 4-E9 CC | | | QKFQGRVTMTRDTSISTAHMELSRLRSDDTAV |
| | x6H10.09 - Full | | | YYCAREKHAVAGIGFDYWGQGTLVTVSSGGG |
| | Sequence | | | GSGGGGSGGGGSDIQMTQSPSSVSASVGDRVTI |
| | | | | TCQASQDISNYLNWYQQKPGKAPKLLIYAASS |
| | | | | LESGVPSRFSGSGSGTDFTLTISSLQPEDFATYY |
| | | | | CQQANSFPLTFGCGTKVDIKSGGGGSEVQLVE |
| | | | | SGGGLVQPGGSLKLSCAASGFTFNKYAMNWV |
| | | | | RQAPGKGMEWVARIRSKYNNYATYYADAVK |
| | | | | DRFTISRDDSKNTLYLQMNNLKTEDTAVYYCV |
| | | | | RAGNFGSSYISYFAYWGQGTLVTVSSGGGGSG |
| | | | | GGGSGGGGSQTVVTQEPSLTVSPGGTVTITCGS |
| | | | | STGAVTSGNYPNWIQKKPGQAPRGLIGGTKFL |
| | | | | APGTPARFSGSLEGGKAALTLSGVQPEDEAEY |
| | | | | YCVLYYSNRWVFGSGTKLTVLGGGGSGGGGS |
| | | | | GGGGSDKTHTCPPCPAPELLGGPSVFLFPPKPK |
| | | | | DTLMISRTPEVTCVVVDVSHEDPEVKFNWYVD |
| | | | | GVEVHNAKTKPCEEQYGSTYRCVSVLTVLHQ |
| | | | | DWLNGKEYKCKVSNKALPAPIEKTISKAKGQP |
| | | | | REPQVYTLPPSREEMTKNQVSLTCLVKGFYPS |
| | | | | DIAVEWESNGQPENNYKTTPPVLDSDGSFFLYS |
| | | | | KLTVDKSRWQQGNVFSCSVMHEALHNHYTQK |
| | | | | SLSLSPGKGGGGSGGGGSGGGGSGGGGSGGG |
| | | | | GSGGGGSDKTHTCPPCPAPELLGGPSVFLFPPK |
| | | | | PKDTLMISRTPEVTCVVVDVSHEDPEVKFNWY |
| | | | | VDGVEVHNAKTKPCEEQYGSTYRCVSVLTVL |
| | | | | HQDWLNGKEYKCKVSNKALPAPIEKTISKAKG |
| | | | | QPREPQVYTLPPSREEMTKNQVSLTCLVKGFY |
| | | | | PSDIAVEWESNGQPENNYKTTPPVLDSDGSFFL |
| | | | | YSKLTVDKSRWQQGNVFSCSVMHEALHNHYT |
| | | | | QKSLSLSPGKGGGGSGGGGSGGGGSQVTLKES |
| | | | | GPTLVKPTETLTLTCTVSGFSFRNARMGVSWIR |
| | | | | QPPGKCLEWLAHIFSNDEKSYSTSLKSRLTISK |
| | | | | DTSKSQVVLTMTNMDPVDTATYFCARVPEYSS |
| | | | | GWYRFDYWGQGTLVTVSSGGGGSGGGGSGG |
| | | | | GGSDIQMTQSPSSLSASVGDRVTISCRASQSIRS |
| | | | | YLNWYQQKPGKAPKLLIYATSSLQGGVPSRFS |
| | | | | GSGSGTDFTLTISSLQPEDFATYYCQQSYSTPFT |
| | | | | FGCGTKVEIKSGGGGSEVQLVESGGGLVQPGG |
| | | | | SLKLSCAASGFTFNKYAMNWVRQAPGKGME |
| | | | | WVARIRSKYNNYATYYADAVKDRFTISRDDSK |
| | | | | NTLYLQMNNLKTEDTAVYYCVRAGNFGSSYIS |
| | | | | YFAYWGQGTLVTVSSGGGGSGGGGSGGGGSQ |
| | | | | TVVTQEPSLTVSPGGTVTITCGSSTGAVTSGNY |
| | | | | PNWIQKKPGQAPRGLIGGTKFLAPGTPARFSGS |
| | | | | LEGGKAALTLSGVQPEDEAEYYCVLYYSNRW |
| | | | | VFGSGTKLTVL |
| 400. | CL1 9-G4 CC x | artificial | aa | QVQLVQSGAEVKKPGASVKVSCKASGYTFTD |
| | I2C x scFc x I2C | | | YYMHWVRQAPGQCLEWMGWINPNSGGPNYA |
| | xFL 4-E9 CC - | | | QKFQGRVTMTRDTSISTAHMELSRLRSDDTAV |
| | Full Sequence | | | YYCAREKHAVAGIGFDYWGQGTLVTVSSGGG |
| | | | | GSGGGGSGGGGSDIQMTQSPSSVSASVGDRVTI |
| | | | | TCQASQDISNYLNWYQQKPGKAPKLLIYAASS |
| | | | | LESGVPSRFSGSGSGTDFTLTISSLQPEDFATYY |
| | | | | CQQANSFPLTFGCGTKVDIKSGGGGSEVQLVE |
| | | | | SGGGLVQPGGSLKLSCAASGFTFNKYAMNWV |
| | | | | RQAPGKGLEWVARIRSKYNNYATYYADSVKD |
| | | | | RFTISRDDSKNTAYLQMNNLKTEDTAVYYCVR |
| | | | | HGNFGNSYISYWAYWGQGTLVTVSSGGGGSG |
| | | | | GGGSGGGGSQTVVTQEPSLTVSPGGTVTLTCG |
| | | | | SSTGAVTSGNYPNWVQQKPGQAPRGLIGGTKF |
| | | | | LAPGTPARFSGSLLGGKAALTLSGVQPEDEAE |
| | | | | YYCVLWYSNRWVFGGGTKLTVLGGGGSGGG |
| | | | | GSGGGGSDKTHTCPPCPAPELLGGPSVFLFPPK |
| | | | | PKDTLMISRTPEVTCVVVDVSHEDPEVKFNWY |
| | | | | VDGVEVHNAKTKPCEEQYGSTYRCVSVLTVL |
| | | | | HQDWLNGKEYKCKVSNKALPAPIEKTISKAKG |
| | | | | QPREPQVYTLPPSREEMTKNQVSLTCLVKGFY |
| | | | | PSDIAVEWESNGQPENNYKTTPPVLDSDGSFFL |
| | | | | YSKLTVDKSRWQQGNVFSCSVMHEALHNHYT |
| | | | | QKSLSLSPGKGGGGSGGGGSGGGGSGGGGSG |
| | | | | GGGSGGGGSDKTHTCPPCPAPELLGGPSVFLFP |
| | | | | PKPKDTLMISRTPEVTCVVVDVSHEDPEVKEN |
| | | | | WYVDGVEVHNAKTKPCEEQYGSTYRCVSVLT |
| | | | | VLHQDWLNGKEYKCKVSNKALPAPIEKTISKA |
| | | | | KGQPREPQVYTLPPSREEMTKNQVSLTCLVKG |
| | | | | FYPSDIAVEWESNGQPENNYKTTPPVLDSDGSF |
| | | | | FLYSKLTVDKSRWQQGNVFSCSVMHEALHNH |
| | | | | YTQKSLSLSPGKGGGGSGGGGSGGGGSEVQLV |
| | | | | ESGGGLVQPGGSLKLSCAASGFTFNKYAMNW |
| | | | | VRQAPGKGLEWVARIRSKYNNYATYYADSVK |
| | | | | DRFTISRDDSKNTAYLQMNNLKTEDTAVYYCV |
| | | | | RHGNFGNSYISYWAYWGQGTLVTVSSGGGGS |
| | | | | GGGGSGGGGSQTVVTQEPSLTVSPGGTVTLTC |
| | | | | GSSTGAVTSGNYPNWVQQKPGQAPRGLIGGTK |
| | | | | FLAPGTPARFSGSLLGGKAALTLSGVQPEDEAE |
| | | | | YYCVLWYSNRWVFGGGTKLTVLGGGGSQVTL |
| | | | | KESGPTLVKPTETLTLTCTVSGFSFRNARMGVS |
| | | | | WIRQPPGKCLEWLAHIFSNDEKSYSTSLKSRLTI |
| | | | | SKDTSKSQVVLTMTNMDPVDTATYFCARVPE |
| | | | | YSSGWYRFDYWGQGTLVTVSSGGGGSGGGGS |
| | | | | GGGGSDIQMTQSPSSLSASVGDRVTISCRASQSI |
| | | | | RSYLNWYQQKPGKAPKLLIYATSSLQGGVPSR |
| | | | | FSGSGSGTDFTLTISSLQPEDFATYYCQQSYSTP |
| | | | | FTFGCGTKVEIK |
| 401. | CL1 9-G4 CC x | artificial | aa | QVQLVQSGAEVKKPGASVKVSCKASGYTFTD |
| | I2C x(G4S)3xscFc | | | YYMHWVRQAPGQCLEWMGWINPNSGGPNYA |
| | x(G4S)3 xFL 4-E9 | | | QKFQGRVTMTRDTSISTAHMELSRLRSDDTAV |
| | CC x I2C - Full | | | YYCAREKHAVAGIGFDYWGQGTLVTVSSGGG |
| | Sequence | | | GSGGGGSGGGGSDIQMTQSPSSVSASVGDRVTI |
| | | | | TCQASQDISNYLNWYQQKPGKAPKLLIYAASS |
| | | | | LESGVPSRFSGSGSGTDFTLTISSLQPEDFATYY |
| | | | | CQQANSFPLTFGCGTKVDIKSGGGGSEVQLVE |
| | | | | SGGGLVQPGGSLKLSCAASGFTFNKYAMNWV |
| | | | | RQAPGKGLEWVARIRSKYNNYATYYADSVKD |
| | | | | RFTISRDDSKNTAYLQMNNLKTEDTAVYYCVR |
| | | | | HGNFGNSYISYWAYWGQGTLVTVSSGGGGSG |
| | | | | GGGSGGGGSQTVVTQEPSLTVSPGGTVTLTCG |
| | | | | SSTGAVTSGNYPNWVQQKPGQAPRGLIGGTKF |
| | | | | LAPGTPARFSGSLLGGKAALTLSGVQPEDEAE |
| | | | | YYCVLWYSNRWVFGGGTKLTVLGGGGSGGG |
| | | | | GSGGGGSDKTHTCPPCPAPELLGGPSVFLFPPK |
| | | | | PKDTLMISRTPEVTCVVVDVSHEDPEVKFNWY |
| | | | | VDGVEVHNAKTKPCEEQYGSTYRCVSVLTVL |
| | | | | HQDWLNGKEYKCKVSNKALPAPIEKTISKAKG |
| | | | | QPREPQVYTLPPSREEMTKNQVSLTCLVKGFY |
| | | | | PSDIAVEWESNGQPENNYKTTPPVLDSDGSFFL |
| | | | | YSKLTVDKSRWQQGNVFSCSVMHEALHNHYT |
| | | | | QKSLSLSPGKGGGGSGGGGSGGGGSGGGGSG |
| | | | | GGGSGGGGSDKTHTCPPCPAPELLGGPSVFLFP |
| | | | | PKPKDTLMISRTPEVTCVVVDVSHEDPEVKFN |
| | | | | WYVDGVEVHNAKTKPCEEQYGSTYRCVSVLT |
| | | | | VLHQDWLNGKEYKCKVSNKALPAPIEKTISKA |
| | | | | KGQPREPQVYTLPPSREEMTKNQVSLTCLVKG |
| | | | | FYPSDIAVEWESNGQPENNYKTTPPVLDSDGSF |
| | | | | FLYSKLTVDKSRWQQGNVFSCSVMHEALHNH |
| | | | | YTQKSLSLSPGKGGGGSGGGGSGGGGSQVTLK |
| | | | | ESGPTLVKPTETLTLTCTVSGFSFRNARMGVS |
| | | | | WIRQPPGKCLEWLAHIFSNDEKSYSTSLKSRLTI |
| | | | | SKDTSKSQVVLTMTNMDPVDTATYFCARVPE |
| | | | | YSSGWYRFDYWGQGTLVTVSSGGGGSGGGGS |
| | | | | GGGGSDIQMTQSPSSLSASVGDRVTISCRASQSI |
| | | | | RSYLNWYQQKPGKAPKLLIYATSSLQGGVPSR |
| | | | | FSGSGSGTDFTLTISSLQPEDFATYYCQQSYSTP |
| | | | | FTFGCGTKVEIKSGGGGSEVQLVESGGGLVQP |
| | | | | GGSLKLSCAASGFTFNKYAMNWVRQAPGKGL |
| | | | | EWVARIRSKYNNYATYYADSVKDRFTISRDDS |
| | | | | KNTAYLQMNNLKTEDTAVYYCVRHGNFGNSY |
| | | | | ISYWAYWGQGTLVTVSSGGGGSGGGGSGGGG |
| | | | | SQTVVTQEPSLTVSPGGTVTLTCGSSTGAVTSG |
| | | | | NYPNWVQQKPGQAPRGLIGGTKFLAPGTPARF |
| | | | | SGSLLGGKAALTLSGVQPEDEAEYYCVLWYSN |
| | | | | RWVFGGGTKLTVL |
| 402. | CL1 9-G4 CC x | artificial | aa | QVQLVQSGAEVKKPGASVKVSCKASGYTFTD |
| | I2Ccc x scFc xFL | | | YYMHWVRQAPGQCLEWMGWINPNSGGPNYA |
| | 4-E9 CC x I2Ccc - | | | QKFQGRVTMTRDTSISTAHMELSRLRSDDTAV |
| | Full Sequence | | | YYCAREKHAVAGIGFDYWGQGTLVTVSSGGG |
| | | | | GSGGGGSGGGGSDIQMTQSPSSVSASVGDRVTI |
| | | | | TCQASQDISNYLNWYQQKPGKAPKLLIYAASS |
| | | | | LESGVPSRFSGSGSGTDFTLTISSLQPEDFATYY |
| | | | | CQQANSFPLTFGCGTKVDIKSGGGGSEVQLVE |
| | | | | SGGGLVQPGGSLKLSCAASGFTFNKYAMNWV |
| | | | | RQAPGKCLEWVARIRSKYNNYATYYADSVKD |
| | | | | RFTISRDDSKNTAYLQMNNLKTEDTAVYYCVR |
| | | | | HGNFGNSYISYWAYWGQGTLVTVSSGGGGSG |
| | | | | GGGSGGGGSQTVVTQEPSLTVSPGGTVTLTCG |
| | | | | SSTGAVTSGNYPNWVQQKPGQAPRGLIGGTKF |
| | | | | LAPGTPARFSGSLLGGKAALTLSGVQPEDEAE |
| | | | | YYCVLWYSNRWVFGCGTKLTVLGGGGSGGG |
| | | | | GSGGGGSDKTHTCPPCPAPELLGGPSVFLFPPK |
| | | | | PKDTLMISRTPEVTCVVVDVSHEDPEVKFNWY |
| | | | | VDGVEVHNAKTKPCEEQYGSTYRCVSVLTVL |
| | | | | HQDWLNGKEYKCKVSNKALPAPIEKTISKAKG |
| | | | | QPREPQVYTLPPSREEMTKNQVSLTCLVKGFY |
| | | | | PSDIAVEWESNGQPENNYKTTPPVLDSDGSFFL |
| | | | | YSKLTVDKSRWQQGNVFSCSVMHEALHNHYT |
| | | | | QKSLSLSPGKGGGGSGGGGSGGGGSGGGGSG |
| | | | | GGGSGGGGSDKTHTCPPCPAPELLGGPSVFLFP |
| | | | | PKPKDTLMISRTPEVTCVVVDVSHEDPEVKEN |
| | | | | WYVDGVEVHNAKTKPCEEQYGSTYRCVSVLT |
| | | | | VLHQDWLNGKEYKCKVSNKALPAPIEKTISKA |
| | | | | KGQPREPQVYTLPPSREEMTKNQVSLTCLVKG |
| | | | | FYPSDIAVEWESNGQPENNYKTTPPVLDSDGSF |
| | | | | FLYSKLTVDKSRWQQGNVFSCSVMHEALHNH |
| | | | | YTQKSLSLSPGKGGGGSGGGGSGGGGSQVTLK |
| | | | | ESGPTLVKPTETLTLTCTVSGFSFRNARMGVS |
| | | | | WIRQPPGKCLEWLAHIFSNDEKSYSTSLKSRLTI |
| | | | | SKDTSKSQVVLTMTNMDPVDTATYFCARVPE |
| | | | | YSSGWYRFDYWGQGTLVTVSSGGGGSGGGGS |
| | | | | GGGGSDIQMTQSPSSLSASVGDRVTISCRASQSI |
| | | | | RSYLNWYQQKPGKAPKLLIYATSSLQGGVPSR |
| | | | | FSGSGSGTDFTLTISSLQPEDFATYYCQQSYSTP |
| | | | | FTFGCGTKVEIKSGGGGSEVQLVESGGGLVQP |
| | | | | GGSLKLSCAASGFTFNKYAMNWVRQAPGKCL |
| | | | | EWVARIRSKYNNYATYYADSVKDRFTISRDDS |
| | | | | KNTAYLQMNNLKTEDTAVYYCVRHGNFGNSY |
| | | | | ISYWAYWGQGTLVTVSSGGGGSGGGGSGGGG |
| | | | | SQTVVTQEPSLTVSPGGTVTLTCGSSTGAVTSG |
| | | | | NYPNWVQQKPGQAPRGLIGGTKFLAPGTPARF |
| | | | | SGSLLGGKAALTLSGVQPEDEAEYYCVLWYSN |
| | | | | RWVFGCGTKLTVL |
| 403. | CL1 9-G4 CC x | artificial | aa | QVQLVQSGAEVKKPGASVKVSCKASGYTFTD |
| | I2Ccc x scFc x | | | YYMHWVRQAPGQCLEWMGWINPNSGGPNYA |
| | I2Ccc xFL 4-E9 | | | QKFQGRVTMTRDTSISTAHMELSRLRSDDTAV |
| | CC - Full | | | YYCAREKHAVAGIGFDYWGQGTLVTVSSGGG |
| | Sequence | | | GSGGGGSGGGGSDIQMTQSPSSVSASVGDRVTI |
| | | | | TCQASQDISNYLNWYQQKPGKAPKLLIYAASS |
| | | | | LESGVPSRFSGSGSGTDFTLTISSLQPEDFATYY |
| | | | | CQQANSFPLTFGCGTKVDIKSGGGGSEVQLVE |
| | | | | SGGGLVQPGGSLKLSCAASGFTFNKYAMNWV |
| | | | | RQAPGKCLEWVARIRSKYNNYATYYADSVKD |
| | | | | RFTISRDDSKNTAYLQMNNLKTEDTAVYYCVR |
| | | | | HGNFGNSYISYWAYWGQGTLVTVSSGGGGSG |
| | | | | GGGSGGGGSQTVVTQEPSLTVSPGGTVTLTCG |
| | | | | SSTGAVTSGNYPNWVQQKPGQAPRGLIGGTKF |
| | | | | LAPGTPARFSGSLLGGKAALTLSGVQPEDEAE |
| | | | | YYCVLWYSNRWVFGCGTKLTVLGGGGSGGG |
| | | | | GSGGGGSDKTHTCPPCPAPELLGGPSVFLFPPK |
| | | | | PKDTLMISRTPEVTCVVVDVSHEDPEVKFNWY |
| | | | | VDGVEVHNAKTKPCEEQYGSTYRCVSVLTVL |
| | | | | HQDWLNGKEYKCKVSNKALPAPIEKTISKAKG |
| | | | | QPREPQVYTLPPSREEMTKNQVSLTCLVKGFY |
| | | | | PSDIAVEWESNGQPENNYKTTPPVLDSDGSFFL |
| | | | | YSKLTVDKSRWQQGNVFSCSVMHEALHNHYT |
| | | | | QKSLSLSPGKGGGGSGGGGSGGGGSGGGGSG |
| | | | | GGGSGGGGSDKTHTCPPCPAPELLGGPSVFLFP |
| | | | | PKPKDTLMISRTPEVTCVVVDVSHEDPEVKFN |
| | | | | WYVDGVEVHNAKTKPCEEQYGSTYRCVSVLT |
| | | | | VLHQDWLNGKEYKCKVSNKALPAPIEKTISKA |
| | | | | KGQPREPQVYTLPPSREEMTKNQVSLTCLVKG |
| | | | | FYPSDIAVEWESNGQPENNYKTTPPVLDSDGSF |
| | | | | FLYSKLTVDKSRWQQGNVFSCSVMHEALHNH |
| | | | | YTQKSLSLSPGKGGGGSGGGGSGGGGSEVQLV |
| | | | | ESGGGLVQPGGSLKLSCAASGFTFNKYAMNW |
| | | | | VRQAPGKCLEWVARIRSKYNNYATYYADSVK |
| | | | | DRFTISRDDSKNTAYLQMNNLKTEDTAVYYCV |
| | | | | RHGNFGNSYISYWAYWGQGTLVTVSSGGGGS |
| | | | | GGGGSGGGGSQTVVTQEPSLTVSPGGTVTLTC |
| | | | | GSSTGAVTSGNYPNWVQQKPGQAPRGLIGGTK |
| | | | | FLAPGTPARFSGSLLGGKAALTLSGVQPEDEAE |
| | | | | YYCVLWYSNRWVFGCGTKLTVLGGGGSQVTL |
| | | | | KESGPTLVKPTETLTLTCTVSGFSFRNARMGVS |
| | | | | WIRQPPGKCLEWLAHIFSNDEKSYSTSLKSRLTI |
| | | | | SKDTSKSQVVLTMTNMDPVDTATYFCARVPE |
| | | | | YSSGWYRFDYWGQGTLVTVSSGGGGSGGGGS |
| | | | | GGGGSDIQMTQSPSSLSASVGDRVTISCRASQSI |
| | | | | RSYLNWYQQKPGKAPKLLIYATSSLQGGVPSR |
| | | | | FSGSGSGTDFTLTISSLQPEDFATYYCQQSYSTP |
| | | | | FTFGCGTKVEIK |
| 404. | CL1 9-G4 CC x | artificial | aa | QVQLVQSGAEVKKPGASVKVSCKASGYTFTD |
| | FL 4-E9 CC xscFc | | | YYMHWVRQAPGQCLEWMGWINPNSGGPNYA |
| | x I2Ccc x I2Ccc - | | | QKFQGRVTMTRDTSISTAHMELSRLRSDDTAV |
| | Full Sequence | | | YYCAREKHAVAGIGFDYWGQGTLVTVSSGGG |
| | | | | GSGGGGSGGGGSDIQMTQSPSSVSASVGDRVTI |
| | | | | TCQASQDISNYLNWYQQKPGKAPKLLIYAASS |
| | | | | LESGVPSRFSGSGSGTDFTLTISSLQPEDFATYY |
| | | | | CQQANSFPLTFGCGTKVDIKSGGGGSQVTLKE |
| | | | | SGPTLVKPTETLTLTCTVSGFSFRNARMGVSWI |
| | | | | RQPPGKCLEWLAHIFSNDEKSYSTSLKSRLTISK |
| | | | | DTSKSQVVLTMTNMDPVDTATYFCARVPEYSS |
| | | | | GWYRFDYWGQGTLVTVSSGGGGSGGGGSGG |
| | | | | GGSDIQMTQSPSSLSASVGDRVTISCRASQSIRS |
| | | | | YLNWYQQKPGKAPKLLIYATSSLQGGVPSRFS |
| | | | | GSGSGTDFTLTISSLQPEDFATYYCQQSYSTPFT |
| | | | | FGCGTKVEIKSGGGGDKTHTCPPCPAPELLGGP |
| | | | | SVFLFPPKPKDTLMISRTPEVTCVVVDVSHEDP |
| | | | | EVKFNWYVDGVEVHNAKTKPCEEQYGSTYRC |
| | | | | VSVLTVLHQDWLNGKEYKCKVSNKALPAPIEK |
| | | | | TISKAKGQPREPQVYTLPPSREEMTKNQVSLTC |
| | | | | LVKGFYPSDIAVEWESNGQPENNYKTTPPVLD |
| | | | | SDGSFFLYSKLTVDKSRWQQGNVFSCSVMHEA |
| | | | | LHNHYTQKSLSLSPGKGGGGSGGGGSGGGGS |
| | | | | GGGGSGGGGSGGGGSDKTHTCPPCPAPELLGG |
| | | | | PSVFLFPPKPKDTLMISRTPEVTCVVVDVSHED |
| | | | | PEVKFNWYVDGVEVHNAKTKPCEEQYGSTYR |
| | | | | CVSVLTVLHQDWLNGKEYKCKVSNKALPAPIE |
| | | | | KTISKAKGQPREPQVYTLPPSREEMTKNQVSLT |
| | | | | CLVKGFYPSDIAVEWESNGQPENNYKTTPPVL |
| | | | | DSDGSFFLYSKLTVDKSRWQQGNVFSCSVMHE |
| | | | | ALHNHYTQKSLSLSPGKGGGGEVQLVESGGGL |
| | | | | VQPGGSLKLSCAASGFTFNKYAMNWVRQAPG |
| | | | | KCLEWVARIRSKYNNYATYYADSVKDRFTISR |
| | | | | DDSKNTAYLQMNNLKTEDTAVYYCVRHGNFG |
| | | | | NSYISYWAYWGQGTLVTVSSGGGGSGGGGSG |
| | | | | GGGSQTVVTQEPSLTVSPGGTVTLTCGSSTGA |
| | | | | VTSGNYPNWVQQKPGQAPRGLIGGTKFLAPGT |
| | | | | PARFSGSLLGGKAALTLSGVQPEDEAEYYCVL |
| | | | | WYSNRWVFGCGTKLTVLGGGGSGGGGSGGG |
| | | | | GSEVQLVESGGGLVQPGGSLKLSCAASGFTFN |
| | | | | KYAMNWVRQAPGKCLEWVARIRSKYNNYAT |
| | | | | YYADSVKDRFTISRDDSKNTAYLQMNNLKTED |
| | | | | TAVYYCVRHGNFGNSYISYWAYWGQGTLVTV |
| | | | | SSGGGGSGGGGSGGGGSQTVVTQEPSLTVSPG |
| | | | | GTVTLTCGSSTGAVTSGNYPNWVQQKPGQAP |
| | | | | RGLIGGTKFLAPGTPARFSGSLLGGKAALTLSG |
| | | | | VQPEDEAEYYCVLWYSNRWVFGCGTKLTVL |
| 405. | CL1 9-G4 CC x | artificial | aa | QVQLVQSGAEVKKPGASVKVSCKASGYTFTD |
| | FL 4-E9 CCx | | | YYMHWVRQAPGQCLEWMGWINPNSGGPNYA |
| | I2Ccc x scFc x | | | QKFQGRVTMTRDTSISTAHMELSRLRSDDTAV |
| | I2Ccc - Full | | | YYCAREKHAVAGIGFDYWGQGTLVTVSSGGG |
| | Sequence | | | GSGGGGSGGGGSDIQMTQSPSSVSASVGDRVTI |
| | | | | TCQASQDISNYLNWYQQKPGKAPKLLIYAASS |
| | | | | LESGVPSRFSGSGSGTDFTLTISSLQPEDFATYY |
| | | | | CQQANSFPLTFGCGTKVDIKSGGGGSQVTLKE |
| | | | | SGPTLVKPTETLTLTCTVSGFSFRNARMGVSWI |
| | | | | RQPPGKCLEWLAHIFSNDEKSYSTSLKSRLTISK |
| | | | | DTSKSQVVLTMTNMDPVDTATYFCARVPEYSS |
| | | | | GWYRFDYWGQGTLVTVSSGGGGSGGGGSGG |
| | | | | GGSDIQMTQSPSSLSASVGDRVTISCRASQSIRS |
| | | | | YLNWYQQKPGKAPKLLIYATSSLQGGVPSRFS |
| | | | | GSGSGTDFTLTISSLQPEDFATYYCQQSYSTPFT |
| | | | | FGCGTKVEIKSGGGGSEVQLVESGGGLVQPGG |
| | | | | SLKLSCAASGFTFNKYAMNWVRQAPGKCLEW |
| | | | | VARIRSKYNNYATYYADSVKDRFTISRDDSKN |
| | | | | TAYLQMNNLKTEDTAVYYCVRHGNFGNSYIS |
| | | | | YWAYWGQGTLVTVSSGGGGSGGGGSGGGGS |
| | | | | QTVVTQEPSLTVSPGGTVTLTCGSSTGAVTSGN |
| | | | | YPNWVQQKPGQAPRGLIGGTKFLAPGTPARFS |
| | | | | GSLLGGKAALTLSGVQPEDEAEYYCVLWYSN |
| | | | | RWVFGCGTKLTVLGGGGDKTHTCPPCPAPELL |
| | | | | GGPSVFLFPPKPKDTLMISRTPEVTCVVVDVSH |
| | | | | EDPEVKFNWYVDGVEVHNAKTKPCEEQYGST |
| | | | | YRCVSVLTVLHQDWLNGKEYKCKVSNKALPA |
| | | | | PIEKTISKAKGQPREPQVYTLPPSREEMTKNQV |
| | | | | SLTCLVKGFYPSDIAVEWESNGQPENNYKTTPP |
| | | | | VLDSDGSFFLYSKLTVDKSRWQQGNVFSCSVM |
| | | | | HEALHNHYTQKSLSLSPGKGGGGSGGGGSGG |
| | | | | GGSGGGGSGGGGSGGGGSDKTHTCPPCPAPEL |
| | | | | LGGPSVFLFPPKPKDTLMISRTPEVTCVVVDVS |
| | | | | HEDPEVKFNWYVDGVEVHNAKTKPCEEQYGS |
| | | | | TYRCVSVLTVLHQDWLNGKEYKCKVSNKALP |
| | | | | APIEKTISKAKGQPREPQVYTLPPSREEMTKNQ |
| | | | | VSLTCLVKGFYPSDIAVEWESNGQPENNYKTT |
| | | | | PPVLDSDGSFFLYSKLTVDKSRWQQGNVFSCS |
| | | | | VMHEALHNHYTQKSLSLSPGKGGGGEVQLVE |
| | | | | SGGGLVQPGGSLKLSCAASGFTFNKYAMNWV |
| | | | | RQAPGKCLEWVARIRSKYNNYATYYADSVKD |
| | | | | RFTISRDDSKNTAYLQMNNLKTEDTAVYYCVR |
| | | | | HGNFGNSYISYWAYWGQGTLVTVSSGGGGSG |
| | | | | GGGSGGGGSQTVVTQEPSLTVSPGGTVTLTCG |
| | | | | SSTGAVTSGNYPNWVQQKPGQAPRGLIGGTKF |
| | | | | LAPGTPARFSGSLLGGKAALTLSGVQPEDEAE |
| | | | | YYCVLWYSNRWVFGCGTKLTVL |
| 406. | CL1 9-G4 CC x | artificial | Aa | QVQLVQSGAEVKKPGASVKVSCKASGYTFTD |
| | FL 4-E9 CCx | | | YYMHWVRQAPGQCLEWMGWINPNSGGPNYA |
| | I2Ccc x I2Ccc | | | QKFQGRVTMTRDTSISTAHMELSRLRSDDTAV |
| | xscFc - Full | | | YYCAREKHAVAGIGFDYWGQGTLVTVSSGGG |
| | Sequence | | | GSGGGGSGGGGSDIQMTQSPSSVSASVGDRVTI |
| | | | | TCQASQDISNYLNWYQQKPGKAPKLLIYAASS |
| | | | | LESGVPSRFSGSGSGTDFTLTISSLQPEDFATYY |
| | | | | CQQANSFPLTFGCGTKVDIKSGGGGSQVTLKE |
| | | | | SGPTLVKPTETLTLTCTVSGFSFRNARMGVSWI |
| | | | | RQPPGKCLEWLAHIFSNDEKSYSTSLKSRLTISK |
| | | | | DTSKSQVVLTMTNMDPVDTATYFCARVPEYSS |
| | | | | GWYRFDYWGQGTLVTVSSGGGGSGGGGSGG |
| | | | | GGSDIQMTQSPSSLSASVGDRVTISCRASQSIRS |
| | | | | YLNWYQQKPGKAPKLLIYATSSLQGGVPSRES |
| | | | | GSGSGTDFTLTISSLQPEDFATYYCQQSYSTPFT |
| | | | | FGCGTKVEIKSGGGGSEVQLVESGGGLVQPGG |
| | | | | SLKLSCAASGFTFNKYAMNWVRQAPGKCLEW |
| | | | | VARIRSKYNNYATYYADSVKDRFTISRDDSKN |
| | | | | TAYLQMNNLKTEDTAVYYCVRHGNFGNSYIS |
| | | | | YWAYWGQGTLVTVSSGGGGSGGGGSGGGGS |
| | | | | QTVVTQEPSLTVSPGGTVTLTCGSSTGAVTSGN |
| | | | | YPNWVQQKPGQAPRGLIGGTKFLAPGTPARFS |
| | | | | GSLLGGKAALTLSGVQPEDEAEYYCVLWYSN |
| | | | | RWVFGCGTKLTVLGGGGSGGGGSGGGGSEVQ |
| | | | | LVESGGGLVQPGGSLKLSCAASGFTFNKYAMN |
| | | | | WVRQAPGKCLEWVARIRSKYNNYATYYADSV |
| | | | | KDRFTISRDDSKNTAYLQMNNLKTEDTAVYYC |
| | | | | VRHGNFGNSYISYWAYWGQGTLVTVSSGGGG |
| | | | | SGGGGSGGGGSQTVVTQEPSLTVSPGGTVTLT |
| | | | | CGSSTGAVTSGNYPNWVQQKPGQAPRGLIGGT |
| | | | | KFLAPGTPARFSGSLLGGKAALTLSGVQPEDEA |
| | | | | EYYCVLWYSNRWVFGCGTKLTVLGGGGDKT |
| | | | | HTCPPCPAPELLGGPSVFLFPPKPKDTLMISRTP |
| | | | | EVTCVVVDVSHEDPEVKFNWYVDGVEVHNA |
| | | | | KTKPCEEQYGSTYRCVSVLTVLHQDWLNGKE |
| | | | | YKCKVSNKALPAPIEKTISKAKGQPREPQVYTL |
| | | | | PPSREEMTKNQVSLTCLVKGFYPSDIAVEWES |
| | | | | NGQPENNYKTTPPVLDSDGSFFLYSKLTVDKS |
| | | | | RWQQGNVFSCSVMHEALHNHYTQKSLSLSPG |
| | | | | KGGGGSGGGGSGGGGSGGGGSGGGGSGGGGS |
| | | | | DKTHTCPPCPAPELLGGPSVFLFPPKPKDTLMIS |
| | | | | RTPEVTCVVVDVSHEDPEVKFNWYVDGVEVH |
| | | | | NAKTKPCEEQYGSTYRCVSVLTVLHQDWLNG |
| | | | | KEYKCKVSNKALPAPIEKTISKAKGQPREPQVY |
| | | | | TLPPSREEMTKNQVSLTCLVKGFYPSDIAVEWE |
| | | | | SNGQPENNYKTTPPVLDSDGSFFLYSKLTVDKS |
| | | | | RWQQGNVFSCSVMHEALHNHYTQKSLSLSPG |
| | | | | K |
| 407. | CL1 9-G4 CC x | artificial | Aa | QVQLVQSGAEVKKPGASVKVSCKASGYTFTD |
| | I2Ccc xG4 xscFc | | | YYMHWVRQAPGQCLEWMGWINPNSGGPNYA |
| | xG4 xFL 4-E9 CC | | | QKFQGRVTMTRDTSISTAHMELSRLRSDDTAV |
| | x I2Ccc - Full | | | YYCAREKHAVAGIGFDYWGQGTLVTVSSGGG |
| | Sequence | | | GSGGGGSGGGGSDIQMTQSPSSVSASVGDRVTI |
| | | | | TCQASQDISNYLNWYQQKPGKAPKLLIYAASS |
| | | | | LESGVPSRFSGSGSGTDFTLTISSLQPEDFATYY |
| | | | | CQQANSFPLTFGCGTKVDIKSGGGGSEVQLVE |
| | | | | SGGGLVQPGGSLKLSCAASGFTFNKYAMNWV |
| | | | | RQAPGKCLEWVARIRSKYNNYATYYADSVKD |
| | | | | RFTISRDDSKNTAYLQMNNLKTEDTAVYYCVR |
| | | | | HGNFGNSYISYWAYWGQGTLVTVSSGGGGSG |
| | | | | GGGSGGGGSQTVVTQEPSLTVSPGGTVTLTCG |
| | | | | SSTGAVTSGNYPNWVQQKPGQAPRGLIGGTKF |
| | | | | LAPGTPARFSGSLLGGKAALTLSGVQPEDEAE |
| | | | | YYCVLWYSNRWVFGCGTKLTVLGGGGDKTH |
| | | | | TCPPCPAPELLGGPSVFLFPPKPKDTLMISRTPE |
| | | | | VTCVVVDVSHEDPEVKFNWYVDGVEVHNAK |
| | | | | TKPCEEQYGSTYRCVSVLTVLHQDWLNGKEY |
| | | | | KCKVSNKALPAPIEKTISKAKGQPREPQVYTLP |
| | | | | PSREEMTKNQVSLTCLVKGFYPSDIAVEWESN |
| | | | | GQPENNYKTTPPVLDSDGSFFLYSKLTVDKSR |
| | | | | WQQGNVFSCSVMHEALHNHYTQKSLSLSPGK |
| | | | | GGGGSGGGGSGGGGSGGGGSGGGGSGGGGSD |
| | | | | KTHTCPPCPAPELLGGPSVFLFPPKPKDTLMISR |
| | | | | TPEVTCVVVDVSHEDPEVKFNWYVDGVEVHN |
| | | | | AKTKPCEEQYGSTYRCVSVLTVLHQDWLNGK |
| | | | | EYKCKVSNKALPAPIEKTISKAKGQPREPQVYT |
| | | | | LPPSREEMTKNQVSLTCLVKGFYPSDIAVEWES |
| | | | | NGQPENNYKTTPPVLDSDGSFFLYSKLTVDKS |
| | | | | RWQQGNVFSCSVMHEALHNHYTQKSLSLSPG |
| | | | | KGGGGQVTLKESGPTLVKPTETLTLTCTVSGFS |
| | | | | FRNARMGVSWIRQPPGKCLEWLAHIFSNDEKS |
| | | | | YSTSLKSRLTISKDTSKSQVVLTMTNMDPVDT |
| | | | | ATYFCARVPEYSSGWYRFDYWGQGTLVTVSS |
| | | | | GGGGSGGGGSGGGGSDIQMTQSPSSLSASVGD |
| | | | | RVTISCRASQSIRSYLNWYQQKPGKAPKLLIYA |
| | | | | TSSLQGGVPSRFSGSGSGTDFTLTISSLQPEDFA |
| | | | | TYYCQQSYSTPFTFGCGTKVEIKSGGGGSEVQL |
| | | | | VESGGGLVQPGGSLKLSCAASGFTFNKYAMN |
| | | | | WVRQAPGKCLEWVARIRSKYNNYATYYADSV |
| | | | | KDRFTISRDDSKNTAYLQMNNLKTEDTAVYYC |
| | | | | VRHGNFGNSYISYWAYWGQGTLVTVSSGGGG |
| | | | | SGGGGSGGGGSQTVVTQEPSLTVSPGGTVTLT |
| | | | | CGSSTGAVTSGNYPNWVQQKPGQAPRGLIGGT |
| | | | | KFLAPGTPARFSGSLLGGKAALTLSGVQPEDEA |
| | | | | EYYCVLWYSNRWVFGCGTKLTVL |
| 408. | CL1 9-G4 CC | artificial | Aa | QVQLVQSGAEVKKPGASVKVSCKASGYTFTD |
| | xscFc x FL 4-E9 | | | YYMHWVRQAPGQCLEWMGWINPNSGGPNYA |
| | CC x I2Ccc x | | | QKFQGRVTMTRDTSISTAHMELSRLRSDDTAV |
| | I2Ccc - Full | | | YYCAREKHAVAGIGFDYWGQGTLVTVSSGGG |
| | Sequence | | | GSGGGGSGGGGSDIQMTQSPSSVSASVGDRVTI |
| | | | | TCQASQDISNYLNWYQQKPGKAPKLLIYAASS |
| | | | | LESGVPSRFSGSGSGTDFTLTISSLQPEDFATYY |
| | | | | CQQANSFPLTFGCGTKVDIKGGGGDKTHTCPP |
| | | | | CPAPELLGGPSVFLFPPKPKDTLMISRTPEVTCV |
| | | | | VVDVSHEDPEVKFNWYVDGVEVHNAKTKPCE |
| | | | | EQYGSTYRCVSVLTVLHQDWLNGKEYKCKVS |
| | | | | NKALPAPIEKTISKAKGQPREPQVYTLPPSREE |
| | | | | MTKNQVSLTCLVKGFYPSDIAVEWESNGQPEN |
| | | | | NYKTTPPVLDSDGSFFLYSKLTVDKSRWQQGN |
| | | | | VFSCSVMHEALHNHYTQKSLSLSPGKGGGGSG |
| | | | | GGGSGGGGSGGGGSGGGGSGGGGSDKTHTCP |
| | | | | PCPAPELLGGPSVFLFPPKPKDTLMISRTPEVTC |
| | | | | VVVDVSHEDPEVKFNWYVDGVEVHNAKTKPC |
| | | | | EEQYGSTYRCVSVLTVLHQDWLNGKEYKCKV |
| | | | | SNKALPAPIEKTISKAKGQPREPQVYTLPPSREE |
| | | | | MTKNQVSLTCLVKGFYPSDIAVEWESNGQPEN |
| | | | | NYKTTPPVLDSDGSFFLYSKLTVDKSRWQQGN |
| | | | | VFSCSVMHEALHNHYTQKSLSLSPGKGGGGQ |
| | | | | VTLKESGPTLVKPTETLTLTCTVSGFSFRNARM |
| | | | | GVSWIRQPPGKCLEWLAHIFSNDEKSYSTSLKS |
| | | | | RLTISKDTSKSQVVLTMTNMDPVDTATYFCAR |
| | | | | VPEYSSGWYRFDYWGQGTLVTVSSGGGGSGG |
| | | | | GGSGGGGSDIQMTQSPSSLSASVGDRVTISCRA |
| | | | | SQSIRSYLNWYQQKPGKAPKLLIYATSSLQGG |
| | | | | VPSRFSGSGSGTDFTLTISSLQPEDFATYYCQQS |
| | | | | YSTPFTFGCGTKVEIKSGGGGSEVQLVESGGGL |
| | | | | VQPGGSLKLSCAASGFTFNKYAMNWVRQAPG |
| | | | | KCLEWVARIRSKYNNYATYYADSVKDRFTISR |
| | | | | DDSKNTAYLQMNNLKTEDTAVYYCVRHGNFG |
| | | | | NSYISYWAYWGQGTLVTVSSGGGGSGGGGSG |
| | | | | GGGSQTVVTQEPSLTVSPGGTVTLTCGSSTGA |
| | | | | VTSGNYPNWVQQKPGQAPRGLIGGTKFLAPGT |
| | | | | PARFSGSLLGGKAALTLSGVQPEDEAEYYCVL |
| | | | | WYSNRWVFGCGTKLTVLGGGGSGGGGSGGG |
| | | | | GSEVQLVESGGGLVQPGGSLKLSCAASGFTFN |
| | | | | KYAMNWVRQAPGKCLEWVARIRSKYNNYAT |
| | | | | YYADSVKDRFTISRDDSKNTAYLQMNNLKTED |
| | | | | TAVYYCVRHGNFGNSYISYWAYWGQGTLVTV |
| | | | | SSGGGGSGGGGSGGGGSQTVVTQEPSLTVSPG |
| | | | | GTVTLTCGSSTGAVTSGNYPNWVQQKPGQAP |
| | | | | RGLIGGTKFLAPGTPARFSGSLLGGKAALTLSG |
| | | | | VQPEDEAEYYCVLWYSNRWVFGCGTKLTVL |
| 409. | CL1_9- | artificial | Aa | QVQLVQSGAEVKKPGASVKVSCKASGYTFTD |
| | G4_CC_x(EAAA | | | YYMHWVRQAPGQCLEWMGWINPNSGGPNYA |
| | K)10_x | | | QKFQGRVTMTRDTSISTAHMELSRLRSDDTAV |
| | I2Ccc_xscFc_xFL | | | YYCAREKHAVAGIGFDYWGQGTLVTVSSGGG |
| | _4- | | | GSGGGGSGGGGSDIQMTQSPSSVSASVGDRVTI |
| | E9_CC_x(EAAA | | | TCQASQDISNYLNWYQQKPGKAPKLLIYAASS |
| | K)10_x I2Ccc - | | | LESGVPSRFSGSGSGTDFTLTISSLQPEDFATYY |
| | Full Sequence | | | CQQANSFPLTFGCGTKVDIKSGEAAAKEAAAK |
| | | | | EAAAKEAAAKEAAAKEAAAKEAAAKEAAAK |
| | | | | EAAAKEAAAKEVQLVESGGGLVQPGGSLKLS |
| | | | | CAASGFTFNKYAMNWVRQAPGKCLEWVARIR |
| | | | | SKYNNYATYYADSVKDRFTISRDDSKNTAYLQ |
| | | | | MNNLKTEDTAVYYCVRHGNFGNSYISYWAY |
| | | | | WGQGTLVTVSSGGGGSGGGGSGGGGSQTVVT |
| | | | | QEPSLTVSPGGTVTLTCGSSTGAVTSGNYPNW |
| | | | | VQQKPGQAPRGLIGGTKFLAPGTPARFSGSLLG |
| | | | | GKAALTLSGVQPEDEAEYYCVLWYSNRWVFG |
| | | | | CGTKLTVLGGGGDKTHTCPPCPAPELLGGPSV |
| | | | | FLFPPKPKDTLMISRTPEVTCVVVDVSHEDPEV |
| | | | | KFNWYVDGVEVHNAKTKPCEEQYGSTYRCVS |
| | | | | VLTVLHQDWLNGKEYKCKVSNKALPAPIEKTI |
| | | | | SKAKGQPREPQVYTLPPSREEMTKNQVSLTCL |
| | | | | VKGFYPSDIAVEWESNGQPENNYKTTPPVLDS |
| | | | | DGSFFLYSKLTVDKSRWQQGNVFSCSVMHEA |
| | | | | LHNHYTQKSLSLSPGKGGGGSGGGGSGGGGS |
| | | | | GGGGSGGGGSGGGGSDKTHTCPPCPAPELLGG |
| | | | | PSVFLFPPKPKDTLMISRTPEVTCVVVDVSHED |
| | | | | PEVKFNWYVDGVEVHNAKTKPCEEQYGSTYR |
| | | | | CVSVLTVLHQDWLNGKEYKCKVSNKALPAPIE |
| | | | | KTISKAKGQPREPQVYTLPPSREEMTKNQVSLT |
| | | | | CLVKGFYPSDIAVEWESNGQPENNYKTTPPVL |
| | | | | DSDGSFFLYSKLTVDKSRWQQGNVFSCSVMHE |
| | | | | ALHNHYTQKSLSLSPGKGGGGQVTLKESGPTL |
| | | | | VKPTETLTLTCTVSGFSFRNARMGVSWIRQPPG |
| | | | | KCLEWLAHIFSNDEKSYSTSLKSRLTISKDTSKS |
| | | | | QVVLTMTNMDPVDTATYFCARVPEYSSGWYR |
| | | | | FDYWGQGTLVTVSSGGGGSGGGGSGGGGSDI |
| | | | | QMTQSPSSLSASVGDRVTISCRASQSIRSYLNW |
| | | | | YQQKPGKAPKLLIYATSSLQGGVPSRFSGSGSG |
| | | | | TDFTLTISSLQPEDFATYYCQQSYSTPFTFGCGT |
| | | | | KVEIKSGEAAAKEAAAKEAAAKEAAAKEAAA |
| | | | | KEAAAKEAAAKEAAAKEAAAKEAAAKEVQL |
| | | | | VESGGGLVQPGGSLKLSCAASGFTFNKYAMN |
| | | | | WVRQAPGKCLEWVARIRSKYNNYATYYADSV |
| | | | | KDRFTISRDDSKNTAYLQMNNLKTEDTAVYYC |
| | | | | VRHGNFGNSYISYWAYWGQGTLVTVSSGGGG |
| | | | | SGGGGSGGGGSQTVVTQEPSLTVSPGGTVTLT |
| | | | | CGSSTGAVTSGNYPNWVQQKPGQAPRGLIGGT |
| | | | | KFLAPGTPARFSGSLLGGKAALTLSGVQPEDEA |
| | | | | EYYCVLWYSNRWVFGCGTKLTVL |
| 410. | CL1_9- | artificial | Aa | QVQLVQSGAEVKKPGASVKVSCKASGYTFTD |
| | G4_CC_x(G4S)3_ | | | YYMHWVRQAPGQCLEWMGWINPNSGGPNYA |
| | x | | | QKFQGRVTMTRDTSISTAHMELSRLRSDDTAV |
| | I2Ccc_xscFc_xFL | | | YYCAREKHAVAGIGFDYWGQGTLVTVSSGGG |
| | _4- | | | GSGGGGSGGGGSDIQMTQSPSSVSASVGDRVTI |
| | E9_CC_x(G4S)3_ | | | TCQASQDISNYLNWYQQKPGKAPKLLIYAASS |
| | x _2Ccc - Full | | | LESGVPSRFSGSGSGTDFTLTISSLQPEDFATYY |
| | Sequence | | | CQQANSFPLTFGCGTKVDIKSGGGGSGGGGSG |
| | | | | GGGSEVQLVESGGGLVQPGGSLKLSCAASGFT |
| | | | | FNKYAMNWVRQAPGKCLEWVARIRSKYNNY |
| | | | | ATYYADSVKDRFTISRDDSKNTAYLQMNNLKT |
| | | | | EDTAVYYCVRHGNFGNSYISYWAYWGQGTLV |
| | | | | TVSSGGGGSGGGGSGGGGSQTVVTQEPSLTVS |
| | | | | PGGTVTLTCGSSTGAVTSGNYPNWVQQKPGQ |
| | | | | APRGLIGGTKFLAPGTPARFSGSLLGGKAALTL |
| | | | | SGVQPEDEAEYYCVLWYSNRWVFGCGTKLTV |
| | | | | LGGGGDKTHTCPPCPAPELLGGPSVFLFPPKPK |
| | | | | DTLMISRTPEVTCVVVDVSHEDPEVKFNWYVD |
| | | | | GVEVHNAKTKPCEEQYGSTYRCVSVLTVLHQ |
| | | | | DWLNGKEYKCKVSNKALPAPIEKTISKAKGQP |
| | | | | REPQVYTLPPSREEMTKNQVSLTCLVKGFYPS |
| | | | | DIAVEWESNGQPENNYKTTPPVLDSDGSFFLYS |
| | | | | KLTVDKSRWQQGNVFSCSVMHEALHNHYTQK |
| | | | | SLSLSPGKGGGGSGGGGSGGGGSGGGGSGGG |
| | | | | GSGGGGSDKTHTCPPCPAPELLGGPSVFLFPPK |
| | | | | PKDTLMISRTPEVTCVVVDVSHEDPEVKFNWY |
| | | | | VDGVEVHNAKTKPCEEQYGSTYRCVSVLTVL |
| | | | | HQDWLNGKEYKCKVSNKALPAPIEKTISKAKG |
| | | | | QPREPQVYTLPPSREEMTKNQVSLTCLVKGFY |
| | | | | PSDIAVEWESNGQPENNYKTTPPVLDSDGSFFL |
| | | | | YSKLTVDKSRWQQGNVFSCSVMHEALHNHYT |
| | | | | QKSLSLSPGKGGGGQVTLKESGPTLVKPTETLT |
| | | | | LTCTVSGFSFRNARMGVSWIRQPPGKCLEWLA |
| | | | | HIFSNDEKSYSTSLKSRLTISKDTSKSQVVLTMT |
| | | | | NMDPVDTATYFCARVPEYSSGWYRFDYWGQ |
| | | | | GTLVTVSSGGGGSGGGGSGGGGSDIQMTQSPS |
| | | | | SLSASVGDRVTISCRASQSIRSYLNWYQQKPGK |
| | | | | APKLLIYATSSLQGGVPSRFSGSGSGTDFTLTIS |
| | | | | SLQPEDFATYYCQQSYSTPFTFGCGTKVEIKSG |
| | | | | GGGSGGGGSGGGGSEVQLVESGGGLVQPGGS |
| | | | | LKLSCAASGFTFNKYAMNWVRQAPGKCLEWV |
| | | | | ARIRSKYNNYATYYADSVKDRFTISRDDSKNT |
| | | | | AYLQMNNLKTEDTAVYYCVRHGNFGNSYISY |
| | | | | WAYWGQGTLVTVSSGGGGSGGGGSGGGGSQ |
| | | | | TVVTQEPSLTVSPGGTVTLTCGSSTGAVTSGNY |
| | | | | PNWVQQKPGQAPRGLIGGTKFLAPGTPARFSG |
| | | | | SLLGGKAALTLSGVQPEDEAEYYCVLWYSNR |
| | | | | WVFGCGTKLTVL |
| 411. | CH3-G8A_6- | artificial | Aa | EVQLLESGGGLVQPGGSLRLSCAASGFSFSSYPI |
| | B12x I2Cx | | | NWVRQAPGKGLEWVGVIWTGGGTNYASSVK |
| | scFc_(G4S)6 - | | | GRFTISRDNSKNTVYLQMNSLRAEDTAVYYCA |
| | Full Sequence | | | KSRGVYDFDGRGAMDYWGQGTLVTVSSGGG |
| | | | | GSGGGGSGGGGSDIVMTQSPDSLAVSLGERATI |
| | | | | NCKSSQSLLYSSNQKNYFAWYQQKPGQPPKLL |
| | | | | IYWASTRESGVPDRFSGSGSGTDFTLTISSLQAE |
| | | | | DVAVYYCQQYYSYPYTFGQGTKLEIKSGGGGS |
| | | | | EVQLVESGGGLVQPGGSLKLSCAASGFTFNKY |
| | | | | AMNWVRQAPGKGLEWVARIRSKYNNYATYY |
| | | | | ADSVKDRFTISRDDSKNTAYLQMNNLKTEDTA |
| | | | | VYYCVRHGNFGNSYISYWAYWGQGTLVTVSS |
| | | | | GGGGSGGGGSGGGGSQTVVTQEPSLTVSPGGT |
| | | | | VTLTCGSSTGAVTSGNYPNWVQQKPGQAPRG |
| | | | | LIGGTKFLAPGTPARFSGSLLGGKAALTLSGVQ |
| | | | | PEDEAEYYCVLWYSNRWVFGGGTKLTVLGGG |
| | | | | GDKTHTCPPCPAPELLGGPSVFLFPPKPKDTLM |
| | | | | ISRTPEVTCVVVDVSHEDPEVKFNWYVDGVEV |
| | | | | HNAKTKPCEEQYGSTYRCVSVLTVLHQDWLN |
| | | | | GKEYKCKVSNKALPAPIEKTISKAKGQPREPQV |
| | | | | YTLPPSREEMTKNQVSLTCLVKGFYPSDIAVE |
| | | | | WESNGQPENNYKTTPPVLDSDGSFFLYSKLTV |
| | | | | DKSRWQQGNVFSCSVMHEALHNHYTQKSLSL |
| | | | | SPGKGGGGSGGGGSGGGGSGGGGSGGGGSGG |
| | | | | GGSDKTHTCPPCPAPELLGGPSVFLFPPKPKDT |
| | | | | LMISRTPEVTCVVVDVSHEDPEVKFNWYVDG |
| | | | | VEVHNAKTKPCEEQYGSTYRCVSVLTVLHQD |
| | | | | WLNGKEYKCKVSNKALPAPIEKTISKAKGQPR |
| | | | | EPQVYTLPPSREEMTKNQVSLTCLVKGFYPSDI |
| | | | | AVEWESNGQPENNYKTTPPVLDSDGSFFLYSK |
| | | | | LTVDKSRWQQGNVFSCSVMHEALHNHYTQKS |
| | | | | LSLSPGK |
| 412. | CL1 9-G4 CC x | artificial | Aa | QVQLVQSGAEVKKPGASVKVSCKASGYTFTD |
| | I2C x scFc - Full | | | YYMHWVRQAPGQCLEWMGWINPNSGGPNYA |
| | Sequence | | | QKFQGRVTMTRDTSISTAHMELSRLRSDDTAV |
| | | | | YYCAREKHAVAGIGFDYWGQGTLVTVSSGGG |
| | | | | GSGGGGSGGGGSDIQMTQSPSSVSASVGDRVTI |
| | | | | TCQASQDISNYLNWYQQKPGKAPKLLIYAASS |
| | | | | LESGVPSRFSGSGSGTDFTLTISSLQPEDFATYY |
| | | | | CQQANSFPLTFGCGTKVDIKSGGGGSEVQLVE |
| | | | | SGGGLVQPGGSLKLSCAASGFTFNKYAMNWV |
| | | | | RQAPGKGLEWVARIRSKYNNYATYYADSVKD |
| | | | | RFTISRDDSKNTAYLQMNNLKTEDTAVYYCVR |
| | | | | HGNFGNSYISYWAYWGQGTLVTVSSGGGGSG |
| | | | | GGGSGGGGSQTVVTQEPSLTVSPGGTVTLTCG |
| | | | | SSTGAVTSGNYPNWVQQKPGQAPRGLIGGTKF |
| | | | | LAPGTPARFSGSLLGGKAALTLSGVQPEDEAE |
| | | | | YYCVLWYSNRWVFGGGTKLTVLGGGGDKTH |
| | | | | TCPPCPAPELLGGPSVFLFPPKPKDTLMISRTPE |
| | | | | VTCVVVDVSHEDPEVKFNWYVDGVEVHNAK |
| | | | | TKPCEEQYGSTYRCVSVLTVLHQDWLNGKEY |
| | | | | KCKVSNKALPAPIEKTISKAKGQPREPQVYTLP |
| | | | | PSREEMTKNQVSLTCLVKGFYPSDIAVEWESN |
| | | | | GQPENNYKTTPPVLDSDGSFFLYSKLTVDKSR |
| | | | | WQQGNVFSCSVMHEALHNHYTQKSLSLSPGK |
| | | | | GGGGSGGGGSGGGGSGGGGSGGGGSGGGGSD |
| | | | | KTHTCPPCPAPELLGGPSVFLFPPKPKDTLMISR |
| | | | | TPEVTCVVVDVSHEDPEVKFNWYVDGVEVHN |
| | | | | AKTKPCEEQYGSTYRCVSVLTVLHQDWLNGK |
| | | | | EYKCKVSNKALPAPIEKTISKAKGQPREPQVYT |
| | | | | LPPSREEMTKNQVSLTCLVKGFYPSDIAVEWES |
| | | | | NGQPENNYKTTPPVLDSDGSFFLYSKLTVDKS |
| | | | | RWQQGNVFSCSVMHEALHNHYTQKSLSLSPG |
| | | | | K |
| 413. | CL1 9-G4 CC x | artificial | Aa | QVQLVQSGAEVKKPGASVKVSCKASGYTFTD |
| | PSMA 76-B10 x | | | YYMHWVRQAPGQCLEWMGWINPNSGGPNYA |
| | I2C x scFc - Full | | | QKFQGRVTMTRDTSISTAHMELSRLRSDDTAV |
| | Sequence | | | YYCAREKHAVAGIGFDYWGQGTLVTVSSGGG |
| | | | | GSGGGGSGGGGSDIQMTQSPSSVSASVGDRVTI |
| | | | | TCQASQDISNYLNWYQQKPGKAPKLLIYAASS |
| | | | | LESGVPSRFSGSGSGTDFTLTISSLQPEDFATYY |
| | | | | CQQANSFPLTFGCGTKVDIKSGGGGSQVQLVE |
| | | | | SGGGLVKPGESLRLSCAASGFTFSDYYMYWVR |
| | | | | QAPGKGLEWVAIISDGGYYTYYSDIIKGRFTISR |
| | | | | DNAKNSLYLQMNSLKAEDTAVYYCARGFPLL |
| | | | | RHGAMDYWGQGTLVTVSSGGGGSGGGGSGG |
| | | | | GGSDIQMTQSPSSLSASVGDRVTITCKASQNVD |
| | | | | TNVAWYQQKPGQAPKSLIYSASYRYSDVPSRF |
| | | | | SGSASGTDFTLTISSVQSEDFATYYCQQYDSYP |
| | | | | YTFGGGTKLEIKSGGGGSEVQLVESGGGLVQP |
| | | | | GGSLKLSCAASGFTFNKYAMNWVRQAPGKGL |
| | | | | EWVARIRSKYNNYATYYADSVKDRFTISRDDS |
| | | | | KNTAYLQMNNLKTEDTAVYYCVRHGNFGNSY |
| | | | | ISYWAYWGQGTLVTVSSGGGGSGGGGSGGGG |
| | | | | SQTVVTQEPSLTVSPGGTVTLTCGSSTGAVTSG |
| | | | | NYPNWVQQKPGQAPRGLIGGTKFLAPGTPARF |
| | | | | SGSLLGGKAALTLSGVQPEDEAEYYCVLWYSN |
| | | | | RWVFGGGTKLTVLGGGGDKTHTCPPCPAPELL |
| | | | | GGPSVFLFPPKPKDTLMISRTPEVTCVVVDVSH |
| | | | | EDPEVKFNWYVDGVEVHNAKTKPCEEQYGST |
| | | | | YRCVSVLTVLHQDWLNGKEYKCKVSNKALPA |
| | | | | PIEKTISKAKGQPREPQVYTLPPSREEMTKNQV |
| | | | | SLTCLVKGFYPSDIAVEWESNGQPENNYKTTPP |
| | | | | VLDSDGSFFLYSKLTVDKSRWQQGNVFSCSVM |
| | | | | HEALHNHYTQKSLSLSPGKGGGGSGGGGSGG |
| | | | | GGSGGGGSGGGGSGGGGSDKTHTCPPCPAPEL |
| | | | | LGGPSVFLFPPKPKDTLMISRTPEVTCVVVDVS |
| | | | | HEDPEVKFNWYVDGVEVHNAKTKPCEEQYGS |
| | | | | TYRCVSVLTVLHQDWLNGKEYKCKVSNKALP |
| | | | | APIEKTISKAKGQPREPQVYTLPPSREEMTKNQ |
| | | | | VSLTCLVKGFYPSDIAVEWESNGQPENNYKTT |
| | | | | PPVLDSDGSFFLYSKLTVDKSRWQQGNVFSCS |
| | | | | VMHEALHNHYTQKSLSLSPGK |
| 414. | EGFRvIII_CC_x | artificial | Aa | QVQLVESGGGVVQSGRSLRLSCAASGFTFRNY |
| | I2C x scFc - Full | | | GMHWVRQAPGKCLEWVAVIWYDGSDKYYAD |
| | Sequence | | | SVRGRFTISRDNSKNTLYLQMNSLRAEDTAVY |
| | | | | YCARDGYDILTGNPRDFDYWGQGTLVTVSSG |
| | | | | GGGSGGGGSGGGGSDTVMTQTPLSSHVTLGQP |
| | | | | ASISCRSSQSLVHSDGNTYLSWLQQRPGQPPRL |
| | | | | LIYRISRRFSGVPDRFSGSGAGTDFTLEISRVEA |
| | | | | EDVGVYYCMQSTHVPRTFGCGTKVEIKSGGG |
| | | | | GSEVQLVESGGGLVQPGGSLKLSCAASGFTFN |
| | | | | KYAMNWVRQAPGKGLEWVARIRSKYNNYAT |
| | | | | YYADSVKDRFTISRDDSKNTAYLQMNNLKTED |
| | | | | TAVYYCVRHGNFGNSYISYWAYWGQGTLVTV |
| | | | | SSGGGGSGGGGSGGGGSQTVVTQEPSLTVSPG |
| | | | | GTVTLTCGSSTGAVTSGNYPNWVQQKPGQAP |
| | | | | RGLIGGTKFLAPGTPARFSGSLLGGKAALTLSG |
| | | | | VQPEDEAEYYCVLWYSNRWVFGGGTKLTVLG |
| | | | | GGGDKTHTCPPCPAPELLGGPSVFLFPPKPKDT |
| | | | | LMISRTPEVTCVVVDVSHEDPEVKFNWYVDG |
| | | | | VEVHNAKTKPCEEQYGSTYRCVSVLTVLHQD |
| | | | | WLNGKEYKCKVSNKALPAPIEKTISKAKGQPR |
| | | | | EPQVYTLPPSREEMTKNQVSLTCLVKGFYPSDI |
| | | | | AVEWESNGQPENNYKTTPPVLDSDGSFFLYSK |
| | | | | LTVDKSRWQQGNVFSCSVMHEALHNHYTQKS |
| | | | | LSLSPGKGGGGSGGGGSGGGGSGGGGSGGGG |
| | | | | SGGGGSDKTHTCPPCPAPELLGGPSVFLFPPKP |
| | | | | KDTLMISRTPEVTCVVVDVSHEDPEVKFNWYV |
| | | | | DGVEVHNAKTKPCEEQYGSTYRCVSVLTVLH |
| | | | | QDWLNGKEYKCKVSNKALPAPIEKTISKAKGQ |
| | | | | PREPQVYTLPPSREEMTKNQVSLTCLVKGFYPS |
| | | | | DIAVEWESNGQPENNYKTTPPVLDSDGSFFLYS |
| | | | | KLTVDKSRWQQGNVFSCSVMHEALHNHYTQK |
| | | | | SLSLSPGK |
| 415. | EpCAM 5-10 x | artificial | aa | ELVMTQSPSSLTVTAGEKVTMSCKSSQSLLNS |
| | I2C x scFc - Full | | | GNQKNYLTWYQQKPGQPPKLLIYWASTRESG |
| | Sequence | | | VPDRFTGSGSGTDFTLTISSVQAEDLAVYYCQN |
| | | | | DYSYPLTFGAGTKLEIKGGGGSGGGGSGGGGS |
| | | | | EVQLLEQSGAELVRPGTSVKISCKASGYAFTNY |
| | | | | WLGWVKQRPGHGLEWIGDIFPGSGNIHYNEKF |
| | | | | KGKATLTADKSSSTAYMQLSSLTFEDSAVYFC |
| | | | | ARLRNWDEPMDYWGQGTTVTVSSGGGGSEV |
| | | | | QLVESGGGLVQPGGSLKLSCAASGFTFNKYAM |
| | | | | NWVRQAPGKGLEWVARIRSKYNNYATYYADS |
| | | | | VKDRFTISRDDSKNTAYLQMNNLKTEDTAVY |
| | | | | YCVRHGNFGNSYISYWAYWGQGTLVTVSSGG |
| | | | | GGSGGGGSGGGGSQTVVTQEPSLTVSPGGTVT |
| | | | | LTCGSSTGAVTSGNYPNWVQQKPGQAPRGLIG |
| | | | | GTKFLAPGTPARFSGSLLGGKAALTLSGVQPED |
| | | | | EAEYYCVLWYSNRWVFGGGTKLTVLGGGGD |
| | | | | KTHTCPPCPAPELLGGPSVFLFPPKPKDTLMISR |
| | | | | TPEVTCVVVDVSHEDPEVKFNWYVDGVEVHN |
| | | | | AKTKPCEEQYGSTYRCVSVLTVLHQDWLNGK |
| | | | | EYKCKVSNKALPAPIEKTISKAKGQPREPQVYT |
| | | | | LPPSREEMTKNQVSLTCLVKGFYPSDIAVEWES |
| | | | | NGQPENNYKTTPPVLDSDGSFFLYSKLTVDKS |
| | | | | RWQQGNVFSCSVMHEALHNHYTQKSLSLSPG |
| | | | | KGGGGSGGGGSGGGGSGGGGSGGGGSGGGGS |
| | | | | DKTHTCPPCPAPELLGGPSVFLFPPKPKDTLMIS |
| | | | | RTPEVTCVVVDVSHEDPEVKFNWYVDGVEVH |
| | | | | NAKTKPCEEQYGSTYRCVSVLTVLHQDWLNG |
| | | | | KEYKCKVSNKALPAPIEKTISKAKGQPREPQVY |
| | | | | TLPPSREEMTKNQVSLTCLVKGFYPSDIAVEWE |
| | | | | SNGQPENNYKTTPPVLDSDGSFFLYSKLTVDKS |
| | | | | RWQQGNVFSCSVMHEALHNHYTQKSLSLSPG |
| | | | | K |
| 416. | FL 4-E9 CC x I2C | artificial | aa | QVTLKESGPTLVKPTETLTLTCTVSGFSFRNAR |
| | x scFc - Full | | | MGVSWIRQPPGKCLEWLAHIFSNDEKSYSTSL |
| | Sequence | | | KSRLTISKDTSKSQVVLTMTNMDPVDTATYFC |
| | | | | ARVPEYSSGWYRFDYWGQGTLVTVSSGGGGS |
| | | | | GGGGSGGGGSDIQMTQSPSSLSASVGDRVTISC |
| | | | | RASQSIRSYLNWYQQKPGKAPKLLIYATSSLQG |
| | | | | GVPSRFSGSGSGTDFTLTISSLQPEDFATYYCQQ |
| | | | | SYSTPFTFGCGTKVEIKSGGGGSEVQLVESGGG |
| | | | | LVQPGGSLKLSCAASGFTFNKYAMNWVRQAP |
| | | | | GKGLEWVARIRSKYNNYATYYADSVKDRFTIS |
| | | | | RDDSKNTAYLQMNNLKTEDTAVYYCVRHGNF |
| | | | | GNSYISYWAYWGQGTLVTVSSGGGGSGGGGS |
| | | | | GGGGSQTVVTQEPSLTVSPGGTVTLTCGSSTG |
| | | | | AVTSGNYPNWVQQKPGQAPRGLIGGTKFLAPG |
| | | | | TPARFSGSLLGGKAALTLSGVQPEDEAEYYCV |
| | | | | LWYSNRWVFGGGTKLTVLGGGGDKTHTCPPC |
| | | | | PAPELLGGPSVFLFPPKPKDTLMISRTPEVTCVV |
| | | | | VDVSHEDPEVKFNWYVDGVEVHNAKTKPCEE |
| | | | | QYGSTYRCVSVLTVLHQDWLNGKEYKCKVSN |
| | | | | KALPAPIEKTISKAKGQPREPQVYTLPPSREEM |
| | | | | TKNQVSLTCLVKGFYPSDIAVEWESNGQPENN |
| | | | | YKTTPPVLDSDGSFFLYSKLTVDKSRWQQGNV |
| | | | | FSCSVMHEALHNHYTQKSLSLSPGKGGGGSGG |
| | | | | GGSGGGGSGGGGSGGGGSGGGGSDKTHTCPP |
| | | | | CPAPELLGGPSVFLFPPKPKDTLMISRTPEVTCV |
| | | | | VVDVSHEDPEVKFNWYVDGVEVHNAKTKPCE |
| | | | | EQYGSTYRCVSVLTVLHQDWLNGKEYKCKVS |
| | | | | NKALPAPIEKTISKAKGQPREPQVYTLPPSREE |
| | | | | MTKNQVSLTCLVKGFYPSDIAVEWESNGQPEN |
| | | | | NYKTTPPVLDSDGSFFLYSKLTVDKSRWQQGN |
| | | | | VFSCSVMHEALHNHYTQKSLSLSPGK |
| 417. | MS 5-F11 x I2C x | artificial | aa | QVQLVESGGGLVKPGGSLRLSCAASGFTFSDY |
| | scFc - Full | | | YMTWIRQAPGKGLEWLSYISSSGSTIYYADSV |
| | Sequence | | | KGRFTISRDNAKNSLFLQMNSLRAEDTAVYYC |
| | | | | ARDRNSHFDYWGQGTLVTVSSGGGGSGGGGS |
| | | | | GGGGSDIQMTQSPSSVSASVGDRVTITCRASQG |
| | | | | INTWLAWYQQKPGKAPKLLIYGASGLQSGVPS |
| | | | | RFSGSGSGTDFTLTISSLQPEDFATYYCQQAKSF |
| | | | | PRTFGQGTKVEIKSGGGGSEVQLVESGGGLVQ |
| | | | | PGGSLKLSCAASGFTFNKYAMNWVRQAPGKG |
| | | | | LEWVARIRSKYNNYATYYADSVKDRFTISRDD |
| | | | | SKNTAYLQMNNLKTEDTAVYYCVRHGNFGNS |
| | | | | YISYWAYWGQGTLVTVSSGGGGSGGGGSGGG |
| | | | | GSQTVVTQEPSLTVSPGGTVTLTCGSSTGAVTS |
| | | | | GNYPNWVQQKPGQAPRGLIGGTKFLAPGTPAR |
| | | | | FSGSLLGGKAALTLSGVQPEDEAEYYCVLWYS |
| | | | | NRWVFGGGTKLTVLGGGGDKTHTCPPCPAPEL |
| | | | | LGGPSVFLFPPKPKDTLMISRTPEVTCVVVDVS |
| | | | | HEDPEVKFNWYVDGVEVHNAKTKPCEEQYGS |
| | | | | TYRCVSVLTVLHQDWLNGKEYKCKVSNKALP |
| | | | | APIEKTISKAKGQPREPQVYTLPPSREEMTKNQ |
| | | | | VSLTCLVKGFYPSDIAVEWESNGQPENNYKTT |
| | | | | PPVLDSDGSFFLYSKLTVDKSRWQQGNVFSCS |
| | | | | VMHEALHNHYTQKSLSLSPGKGGGGSGGGGS |
| | | | | GGGGSGGGGSGGGGSGGGGSDKTHTCPPCPAP |
| | | | | ELLGGPSVFLFPPKPKDTLMISRTPEVTCVVVD |
| | | | | VSHEDPEVKFNWYVDGVEVHNAKTKPCEEQY |
| | | | | GSTYRCVSVLTVLHQDWLNGKEYKCKVSNKA |
| | | | | LPAPIEKTISKAKGQPREPQVYTLPPSREEMTK |
| | | | | NQVSLTCLVKGFYPSDIAVEWESNGQPENNYK |
| | | | | TTPPVLDSDGSFFLYSKLTVDKSRWQQGNVFS |
| | | | | CSVMHEALHNHYTQKSLSLSPGK |
| 418. | MSLN H2 x I2C | artificial | Aa | EVQLLESGGGVVQPGRSLRLSCAASGFTFSSYG |
| | xscFc - Full | | | MGWVRQAPGKGLEWVAVISYDGSNKYYADS |
| | Sequence | | | VKGRFTISRDNSKNTLYLQMNSLRAEDTAVYY |
| | | | | CAREGAHFGSGSYYPLYYYYAMDVWGQGTT |
| | | | | VTVSSGGGGSGGGGSGGGGSELTLTQSPGTLS |
| | | | | LSPGERATLSCRASQSVSSSYLAWYQQKPGQA |
| | | | | PRLLIYGASIRATGIPDRFSGSGSGTDFTLTISRL |
| | | | | EPEDFAVYYCQQYGSSPIFTFGPGTKVEIKSGG |
| | | | | GGSEVQLVESGGGLVQPGGSLKLSCAASGFTF |
| | | | | NKYAMNWVRQAPGKGLEWVARIRSKYNNYA |
| | | | | TYYADSVKDRFTISRDDSKNTAYLQMNNLKTE |
| | | | | DTAVYYCVRHGNFGNSYISYWAYWGQGTLVT |
| | | | | VSSGGGGSGGGGSGGGGSQTVVTQEPSLTVSP |
| | | | | GGTVTLTCGSSTGAVTSGNYPNWVQQKPGQA |
| | | | | PRGLIGGTKFLAPGTPARFSGSLLGGKAALTLS |
| | | | | GVQPEDEAEYYCVLWYSNRWVFGGGTKLTVL |
| | | | | GGGGDKTHTCPPCPAPELLGGPSVFLFPPKPKD |
| | | | | TLMISRTPEVTCVVVDVSHEDPEVKFNWYVDG |
| | | | | VEVHNAKTKPCEEQYGSTYRCVSVLTVLHQD |
| | | | | WLNGKEYKCKVSNKALPAPIEKTISKAKGQPR |
| | | | | EPQVYTLPPSREEMTKNQVSLTCLVKGFYPSDI |
| | | | | AVEWESNGQPENNYKTTPPVLDSDGSFFLYSK |
| | | | | LTVDKSRWQQGNVFSCSVMHEALHNHYTQKS |
| | | | | LSLSPGKGGGGSGGGGSGGGGSGGGGSGGGG |
| | | | | SGGGGSDKTHTCPPCPAPELLGGPSVFLFPPKP |
| | | | | KDTLMISRTPEVTCVVVDVSHEDPEVKFNWYV |
| | | | | DGVEVHNAKTKPCEEQYGSTYRCVSVLTVLH |
| | | | | QDWLNGKEYKCKVSNKALPAPIEKTISKAKGQ |
| | | | | PREPQVYTLPPSREEMTKNQVSLTCLVKGFYPS |
| | | | | DIAVEWESNGQPENNYKTTPPVLDSDGSFFLYS |
| | | | | KLTVDKSRWQQGNVFSCSVMHEALHNHYTQK |
| | | | | SLSLSPGK |
| 419. | PSMA 76-B10 x | artificial | Aa | QVQLVESGGGLVKPGESLRLSCAASGFTFSDY |
| | FL 4-E9 CC x I2C | | | YMYWVRQAPGKGLEWVAIISDGGYYTYYSDII |
| | xscFc - Full | | | KGRFTISRDNAKNSLYLQMNSLKAEDTAVYYC |
| | Sequence | | | ARGFPLLRHGAMDYWGQGTLVTVSSGGGGSG |
| | | | | GGGSGGGGSDIQMTQSPSSLSASVGDRVTITCK |
| | | | | ASQNVDTNVAWYQQKPGQAPKSLIYSASYRY |
| | | | | SDVPSRFSGSASGTDFTLTISSVQSEDFATYYCQ |
| | | | | QYDSYPYTFGGGTKLEIKSGGGGSQVTLKESG |
| | | | | PTLVKPTETLTLTCTVSGFSFRNARMGVSWIRQ |
| | | | | PPGKCLEWLAHIFSNDEKSYSTSLKSRLTISKDT |
| | | | | SKSQVVLTMTNMDPVDTATYFCARVPEYSSG |
| | | | | WYRFDYWGQGTLVTVSSGGGGSGGGGSGGG |
| | | | | GSDIQMTQSPSSLSASVGDRVTISCRASQSIRSY |
| | | | | LNWYQQKPGKAPKLLIYATSSLQGGVPSRFSG |
| | | | | SGSGTDFTLTISSLQPEDFATYYCQQSYSTPFTF |
| | | | | GCGTKVEIKSGGGGSEVQLVESGGGLVQPGGS |
| | | | | LKLSCAASGFTFNKYAMNWVRQAPGKGLEW |
| | | | | VARIRSKYNNYATYYADSVKDRFTISRDDSKN |
| | | | | TAYLQMNNLKTEDTAVYYCVRHGNFGNSYIS |
| | | | | YWAYWGQGTLVTVSSGGGGSGGGGSGGGGS |
| | | | | QTVVTQEPSLTVSPGGTVTLTCGSSTGAVTSGN |
| | | | | YPNWVQQKPGQAPRGLIGGTKFLAPGTPARFS |
| | | | | GSLLGGKAALTLSGVQPEDEAEYYCVLWYSN |
| | | | | RWVFGGGTKLTVLGGGGDKTHTCPPCPAPELL |
| | | | | GGPSVFLFPPKPKDTLMISRTPEVTCVVVDVSH |
| | | | | EDPEVKFNWYVDGVEVHNAKTKPCEEQYGST |
| | | | | YRCVSVLTVLHQDWLNGKEYKCKVSNKALPA |
| | | | | PIEKTISKAKGQPREPQVYTLPPSREEMTKNQV |
| | | | | SLTCLVKGFYPSDIAVEWESNGQPENNYKTTPP |
| | | | | VLDSDGSFFLYSKLTVDKSRWQQGNVFSCSVM |
| | | | | HEALHNHYTQKSLSLSPGKGGGGSGGGGSGG |
| | | | | GGSGGGGSGGGGSGGGGSDKTHTCPPCPAPEL |
| | | | | LGGPSVFLFPPKPKDTLMISRTPEVTCVVVDVS |
| | | | | HEDPEVKFNWYVDGVEVHNAKTKPCEEQYGS |
| | | | | TYRCVSVLTVLHQDWLNGKEYKCKVSNKALP |
| | | | | APIEKTISKAKGQPREPQVYTLPPSREEMTKNQ |
| | | | | VSLTCLVKGFYPSDIAVEWESNGQPENNYKTT |
| | | | | PPVLDSDGSFFLYSKLTVDKSRWQQGNVFSCS |
| | | | | VMHEALHNHYTQKSLSLSPGK |
| 420. | VH CDR1 CD3 | artificial | Aa | GFTFNKYAIN |
| | B2 | | | |
| 421. | VH CDR2 CD3 | artificial | Aa | RIRSKYNNYATYYADQVK |
| | B2 | | | |
| 422. | VH CDR3 CD3 | artificial | Aa | HANFGNSYISYWAY |
| | B2 | | | |
| 423. | VL CDR1 CD3 | artificial | Aa | ASSTGAVTSGNYPN |
| | B2 | | | |
| 424. | VL CDR2 CD3 | artificial | Aa | GTKFLVP |
| | B2 | | | |
| 425. | VL CDR3 CD3 | artificial | Aa | TLWYSNRWV |
| | B2 | | | |
| 426. | H VL CD3 B2 | artificial | Aa | EVQLVESGGGLVQPGGSLKLSCAASGFTENKY |
| | binder | | | AINWVRQAPGKGLEWVARIRSKYNNYATYYA |
| | | | | DQVKDRFTISRDDSKNTAYLQMNNLKTEDTA |
| | | | | VYYCVR |
| | | | | HANFGNSYISYWAYWGQGTLVTVSSGGGGSG |
| | | | | GGGSGGGGSQTVVTQEPSLTVSPGGTVTLTCA |
| | | | | SSTGAVTSGNYPNWVQQKPGQAPRGLIGGTKF |
| | | | | LVP |
| | | | | GTPARFSGSLLGGKAALTLSGVQPEDEAEYYC |
| | | | | TLWYSNRWVFGGGTKLTVL |
| 427. | CL1 9-G4 CC | artificial | Aa | QVQLVQSGAEVKKPGASVKVSCKASGYTFTD |
| | xI2Ccc xHSA xFL | | | YYMHWVRQAPGQCLEWMGWINPNSGGPNYA |
| | 4-E9 CC xI2Ccc | | | QKFQGRVTMTRDTSISTAHMELSRLRSDDTAV |
| | | | | YYCAREKHAVAGIGFDYWGQGTLVTVSSGGG |
| | | | | GSGGGGSGGGGSDIQMTQSPSSVSASVGDRVTI |
| | | | | TCQASQDISNYLNWYQQKPGKAPKLLIYAASS |
| | | | | LESGVPSRFSGSGSGTDFTLTISSLQPEDFATYY |
| | | | | CQQANSFPLTFGCGTKVDIKSGGGGSEVQLVE |
| | | | | SGGGLVQPGGSLKLSCAASGFTFNKYAMNWV |
| | | | | RQAPGKCLEWVARIRSKYNNYATYYADSVKD |
| | | | | RFTISRDDSKNTAYLQMNNLKTEDTAVYYCVR |
| | | | | HGNFGNSYISYWAYWGQGTLVTVSSGGGGSG |
| | | | | GGGSGGGGSQTVVTQEPSLTVSPGGTVTLTCG |
| | | | | SSTGAVTSGNYPNWVQQKPGQAPRGLIGGTKF |
| | | | | LAPGTPARFSGSLLGGKAALTLSGVQPEDEAE |
| | | | | YYCVLWYSNRWVFGCGTKLTVLGGGGSGGG |
| | | | | GSGGGGSDAHKSEVAHRFKDLGEENFKALVLI |
| | | | | AFAQYLQQCPFEDHVKLVNEVTEFAKTCVADE |
| | | | | SAENCDKSLHTLFGDKLCTVATLRETYGEMAD |
| | | | | CCAKQEPERNECFLQHKDDNPNLPRLVRPEVD |
| | | | | VMCTAFHDNEETFLKKYLYEIARRHPYFYAPE |
| | | | | LLFFAKRYKAAFTECCQAADKAACLLPKLDEL |
| | | | | RDEGKASSAKQRLKCASLQKFGERAFKAWAV |
| | | | | ARLSQRFPKAEFAEVSKLVTDLTKVHTECCHG |
| | | | | DLLECADDRADLAKYICENQDSISSKLKECCEK |
| | | | | PLLEKSHCIAEVENDEMPADLPSLAADFVESKD |
| | | | | VCKNYAEAKDVFLGMFLYEYARRHPDYSVVL |
| | | | | LLRLAKTYETTLEKCCAAADPHECYAKVFDEF |
| | | | | KPLVEEPQNLIKQNCELFEQLGEYKFQNALLVR |
| | | | | YTKKVPQVSTPTLVEVSRNLGKVGSKCCKHPE |
| | | | | AKRMPCAEDYLSVVLNQLCVLHEKTPVSDRV |
| | | | | TKCCTESLVNRRPCFSALEVDETYVPKEFNAET |
| | | | | FTFHADICTLSEKERQIKKQTALVELVKHKPKA |
| | | | | TKEQLKAVMDDFAAFVEKCCKADDKETCFAE |
| | | | | EGKKLVAASQAALGLGGGGSGGGGSGGGGSQ |
| | | | | VTLKESGPTLVKPTETLTLTCTVSGFSFRNARM |
| | | | | GVSWIRQPPGKCLEWLAHIFSNDEKSYSTSLKS |
| | | | | RLTISKDTSKSQVVLTMTNMDPVDTATYFCAR |
| | | | | VPEYSSGWYRFDYWGQGTLVTVSSGGGGSGG |
| | | | | GGSGGGGSDIQMTQSPSSLSASVGDRVTISCRA |
| | | | | SQSIRSYLNWYQQKPGKAPKLLIYATSSLQGG |
| | | | | VPSRFSGSGSGTDFTLTISSLQPEDFATYYCQQS |
| | | | | YSTPFTFGCGTKVEIKSGGGGSEVQLVESGGGL |
| | | | | VQPGGSLKLSCAASGFTFNKYAMNWVRQAPG |
| | | | | KCLEWVARIRSKYNNYATYYADSVKDRFTISR |
| | | | | DDSKNTAYLQMNNLKTEDTAVYYCVRHGNFG |
| | | | | NSYISYWAYWGQGTLVTVSSGGGGSGGGGSG |
| | | | | GGGSQTVVTQEPSLTVSPGGTVTLTCGSSTGA |
| | | | | VTSGNYPNWVQQKPGQAPRGLIGGTKFLAPGT |
| | | | | PARFSGSLLGGKAALTLSGVQPEDEAEYYCVL |
| | | | | WYSNRWVFGCGTKLTVL |
| 428. | CL1 9-G4 CC | artificial | Aa | QVQLVQSGAEVKKPGASVKVSCKASGYTFTD |
| | xI2Ccc xFL 4-E9 | | | YYMHWVRQAPGQCLEWMGWINPNSGGPNYA |
| | CC xI2Ccc | | | QKFQGRVTMTRDTSISTAHMELSRLRSDDTAV |
| | | | | YYCAREKHAVAGIGFDYWGQGTLVTVSSGGG |
| | | | | GSGGGGSGGGGSDIQMTQSPSSVSASVGDRVTI |
| | | | | TCQASQDISNYLNWYQQKPGKAPKLLIYAASS |
| | | | | LESGVPSRFSGSGSGTDFTLTISSLQPEDFATYY |
| | | | | CQQANSFPLTFGCGTKVDIKSGGGGSEVQLVE |
| | | | | SGGGLVQPGGSLKLSCAASGFTFNKYAMNWV |
| | | | | RQAPGKCLEWVARIRSKYNNYATYYADSVKD |
| | | | | RFTISRDDSKNTAYLQMNNLKTEDTAVYYCVR |
| | | | | HGNFGNSYISYWAYWGQGTLVTVSSGGGGSG |
| | | | | GGGSGGGGSQTVVTQEPSLTVSPGGTVTLTCG |
| | | | | SSTGAVTSGNYPNWVQQKPGQAPRGLIGGTKF |
| | | | | LAPGTPARFSGSLLGGKAALTLSGVQPEDEAE |
| | | | | YYCVLWYSNRWVFGCGTKLTVLGGGGSQVTL |
| | | | | KESGPTLVKPTETLTLTCTVSGFSFRNARMGVS |
| | | | | WIRQPPGKCLEWLAHIFSNDEKSYSTSLKSRLTI |
| | | | | SKDTSKSQVVLTMTNMDPVDTATYFCARVPE |
| | | | | YSSGWYRFDYWGQGTLVTVSSGGGGSGGGGS |
| | | | | GGGGSDIQMTQSPSSLSASVGDRVTISCRASQSI |
| | | | | RSYLNWYQQKPGKAPKLLIYATSSLQGGVPSR |
| | | | | FSGSGSGTDFTLTISSLQPEDFATYYCQQSYSTP |
| | | | | FTFGCGTKVEIKSGGGGSEVQLVESGGGLVQP |
| | | | | GGSLKLSCAASGFTFNKYAMNWVRQAPGKCL |
| | | | | EWVARIRSKYNNYATYYADSVKDRFTISRDDS |
| | | | | KNTAYLQMNNLKTEDTAVYYCVRHGNFGNSY |
| | | | | ISYWAYWGQGTLVTVSSGGGGSGGGGSGGGG |
| | | | | SQTVVTQEPSLTVSPGGTVTLTCGSSTGAVTSG |
| | | | | NYPNWVQQKPGQAPRGLIGGTKFLAPGTPARF |
| | | | | SGSLLGGKAALTLSGVQPEDEAEYYCVLWYSN |
| | | | | RWVFGCGTKLTVL |
| 429. | CL1 9-G4 CC | artificial | Aa | QVQLVQSGAEVKKPGASVKVSCKASGYTFTD |
| | xI2Ccc | | | YYMHWVRQAPGQCLEWMGWINPNSGGPNYA |
| | x(EAAAK)10xFL | | | QKFQGRVTMTRDTSISTAHMELSRLRSDDTAV |
| | 4-E9 CC xI2Ccc | | | YYCAREKHAVAGIGFDYWGQGTLVTVSSGGG |
| | | | | GSGGGGSGGGGSDIQMTQSPSSVSASVGDRVTI |
| | | | | TCQASQDISNYLNWYQQKPGKAPKLLIYAASS |
| | | | | LESGVPSRFSGSGSGTDFTLTISSLQPEDFATYY |
| | | | | CQQANSFPLTFGCGTKVDIKSGGGGSEVQLVE |
| | | | | SGGGLVQPGGSLKLSCAASGFTFNKYAMNWV |
| | | | | RQAPGKCLEWVARIRSKYNNYATYYADSVKD |
| | | | | RFTISRDDSKNTAYLQMNNLKTEDTAVYYCVR |
| | | | | HGNFGNSYISYWAYWGQGTLVTVSSGGGGSG |
| | | | | GGGSGGGGSQTVVTQEPSLTVSPGGTVTLTCG |
| | | | | SSTGAVTSGNYPNWVQQKPGQAPRGLIGGTKF |
| | | | | LAPGTPARFSGSLLGGKAALTLSGVQPEDEAE |
| | | | | YYCVLWYSNRWVFGCGTKLTVLEAAAKEAA |
| | | | | AKEAAAKEAAAKEAAAKEAAAKEAAAKEAA |
| | | | | AKEAAAKEAAAKQVTLKESGPTLVKPTETLTL |
| | | | | TCTVSGFSFRNARMGVSWIRQPPGKCLEWLAH |
| | | | | IFSNDEKSYSTSLKSRLTISKDTSKSQVVLTMTN |
| | | | | MDPVDTATYFCARVPEYSSGWYRFDYWGQGT |
| | | | | LVTVSSGGGGSGGGGSGGGGSDIQMTQSPSSL |
| | | | | SASVGDRVTISCRASQSIRSYLNWYQQKPGKA |
| | | | | PKLLIYATSSLQGGVPSRFSGSGSGTDFTLTISSL |
| | | | | QPEDFATYYCQQSYSTPFTFGCGTKVEIKSGGG |
| | | | | GSEVQLVESGGGLVQPGGSLKLSCAASGFTFN |
| | | | | KYAMNWVRQAPGKCLEWVARIRSKYNNYAT |
| | | | | YYADSVKDRFTISRDDSKNTAYLQMNNLKTED |
| | | | | TAVYYCVRHGNFGNSYISYWAYWGQGTLVTV |
| | | | | SSGGGGSGGGGSGGGGSQTVVTQEPSLTVSPG |
| | | | | GTVTLTCGSSTGAVTSGNYPNWVQQKPGQAP |
| | | | | RGLIGGTKFLAPGTPARFSGSLLGGKAALTLSG |
| | | | | VQPEDEAEYYCVLWYSNRWVFGCGTKLTVL |
| 430. | CL1 9-G4 CC | artificial | Aa | QVQLVQSGAEVKKPGASVKVSCKASGYTFTD |
| | xI2Ccc -scFc - | | | YYMHWVRQAPGQCLEWMGWINPNSGGPNYA |
| | scFc2 xFL 4-E9 | | | QKFQGRVTMTRDTSISTAHMELSRLRSDDTAV |
| | CC xI2Ccc | | | YYCAREKHAVAGIGFDYWGQGTLVTVSSGGG |
| | | | | GSGGGGSGGGGSDIQMTQSPSSVSASVGDRVTI |
| | | | | TCQASQDISNYLNWYQQKPGKAPKLLIYAASS |
| | | | | LESGVPSRFSGSGSGTDFTLTISSLQPEDFATYY |
| | | | | CQQANSFPLTFGCGTKVDIKSGGGGSEVQLVE |
| | | | | SGGGLVQPGGSLKLSCAASGFTFNKYAMNWV |
| | | | | RQAPGKCLEWVARIRSKYNNYATYYADSVKD |
| | | | | RFTISRDDSKNTAYLQMNNLKTEDTAVYYCVR |
| | | | | HGNFGNSYISYWAYWGQGTLVTVSSGGGGSG |
| | | | | GGGSGGGGSQTVVTQEPSLTVSPGGTVTLTCG |
| | | | | SSTGAVTSGNYPNWVQQKPGQAPRGLIGGTKF |
| | | | | LAPGTPARFSGSLLGGKAALTLSGVQPEDEAE |
| | | | | YYCVLWYSNRWVFGCGTKLTVLGGGGSGGG |
| | | | | GSGGGGSDKTHTCPPCPAPELLGGPSVFLFPPK |
| | | | | PKDTLMISRTPEVTCVVVDVSHEDPEVKFNWY |
| | | | | VDGVEVHNAKTKPCEEQYGSTYRCVSVLTVL |
| | | | | HQDWLNGKEYKCKVSNKALPAPIEKTISKAKG |
| | | | | QPREPQVYTLPPSREEMTKNQVSLTCLVKGFY |
| | | | | PSDIAVEWESNGQPENNYKTTPPVLDSDGSFFL |
| | | | | YSKLTVDKSRWQQGNVFSCSVMHEALHNHYT |
| | | | | QKSLSLSPGKGGGGSGGGGSGGGGSGGGGSG |
| | | | | GGGSGGGGSDKTHTCPPCPAPELLGGPSVFLFP |
| | | | | PKPKDTLMISRTPEVTCVVVDVSHEDPEVKEN |
| | | | | WYVDGVEVHNAKTKPCEEQYGSTYRCVSVLT |
| | | | | VLHQDWLNGKEYKCKVSNKALPAPIEKTISKA |
| | | | | KGQPREPQVYTLPPSREEMTKNQVSLTCLVKG |
| | | | | FYPSDIAVEWESNGQPENNYKTTPPVLDSDGSF |
| | | | | FLYSKLTVDKSRWQQGNVFSCSVMHEALHNH |
| | | | | YTQKSLSLSPGKDKTHTCPPCPAPELLGGPSVF |
| | | | | LFPPKPKDTLMISRTPEVTCVVVDVSHEDPEVK |
| | | | | FNWYVDGVEVHNAKTKPCEEQYGSTYRCVSV |
| | | | | LTVLHQDWLNGKEYKCKVSNKALPAPIEKTIS |
| | | | | KAKGQPREPQVYTLPPSREEMTKNQVSLTCLV |
| | | | | KGFYPSDIAVEWESNGQPENNYKTTPPVLDSD |
| | | | | GSFFLYSKLTVDKSRWQQGNVFSCSVMHEAL |
| | | | | HNHYTQKSLSLSPGKGGGGSGGGGSGGGGSG |
| | | | | GGGSGGGGSGGGGSDKTHTCPPCPAPELLGGP |
| | | | | SVFLFPPKPKDTLMISRTPEVTCVVVDVSHEDP |
| | | | | EVKFNWYVDGVEVHNAKTKPCEEQYGSTYRC |
| | | | | VSVLTVLHQDWLNGKEYKCKVSNKALPAPIEK |
| | | | | TISKAKGQPREPQVYTLPPSREEMTKNQVSLTC |
| | | | | LVKGFYPSDIAVEWESNGQPENNYKTTPPVLD |
| | | | | SDGSFFLYSKLTVDKSRWQQGNVFSCSVMHEA |
| | | | | LHNHYTQKSLSLSPGKGGGGSGGGGSGGGGS |
| | | | | QVTLKESGPTLVKPTETLTLTCTVSGFSFRNAR |
| | | | | MGVSWIRQPPGKCLEWLAHIFSNDEKSYSTSL |
| | | | | KSRLTISKDTSKSQVVLTMTNMDPVDTATYFC |
| | | | | ARVPEYSSGWYRFDYWGQGTLVTVSSGGGGS |
| | | | | GGGGSGGGGSDIQMTQSPSSLSASVGDRVTISC |
| | | | | RASQSIRSYLNWYQQKPGKAPKLLIYATSSLQG |
| | | | | GVPSRFSGSGSGTDFTLTISSLQPEDFATYYCQQ |
| | | | | SYSTPFTFGCGTKVEIKSGGGGSEVQLVESGGG |
| | | | | LVQPGGSLKLSCAASGFTFNKYAMNWVRQAP |
| | | | | GKCLEWVARIRSKYNNYATYYADSVKDRFTIS |
| | | | | RDDSKNTAYLQMNNLKTEDTAVYYCVRHGNF |
| | | | | GNSYISYWAYWGQGTLVTVSSGGGGSGGGGS |
| | | | | GGGGSQTVVTQEPSLTVSPGGTVTLTCGSSTG |
| | | | | AVTSGNYPNWVQQKPGQAPRGLIGGTKFLAPG |
| | | | | TPARFSGSLLGGKAALTLSGVQPEDEAEYYCV |
| | | | | LWYSNRWVFGCGTKLTVL |
| 431. | EpCAM 5-10 | artificial | Aa | ELVMTQSPSSLTVTAGEKVTMSCKSSQSLLNS |
| | xI2Ccc xHSA | | | GNQKNYLTWYQQKPGQPPKLLIYWASTRESG |
| | xH2 xI2Ccc | | | VPDRFTGSGSGTDFTLTISSVQAEDLAVYYCQN |
| | | | | DYSYPLTFGAGTKLEIKGGGGSGGGGSGGGGS |
| | | | | EVQLLEQSGAELVRPGTSVKISCKASGYAFTNY |
| | | | | WLGWVKQRPGHGLEWIGDIFPGSGNIHYNEKF |
| | | | | KGKATLTADKSSSTAYMQLSSLTFEDSAVYFC |
| | | | | ARLRNWDEPMDYWGQGTTVTVSSGGGGSEV |
| | | | | QLVESGGGLVQPGGSLKLSCAASGFTFNKYAM |
| | | | | NWVRQAPGKCLEWVARIRSKYNNYATYYADS |
| | | | | VKDRFTISRDDSKNTAYLQMNNLKTEDTAVY |
| | | | | YCVRHGNFGNSYISYWAYWGQGTLVTVSSGG |
| | | | | GGSGGGGSGGGGSQTVVTQEPSLTVSPGGTVT |
| | | | | LTCGSSTGAVTSGNYPNWVQQKPGQAPRGLIG |
| | | | | GTKFLAPGTPARFSGSLLGGKAALTLSGVQPED |
| | | | | EAEYYCVLWYSNRWVFGCGTKLTVLGGGGSG |
| | | | | GGGSGGGGSDAHKSEVAHRFKDLGEENFKAL |
| | | | | VLIAFAQYLQQCPFEDHVKLVNEVTEFAKTCV |
| | | | | ADESAENCDKSLHTLFGDKLCTVATLRETYGE |
| | | | | MADCCAKQEPERNECFLQHKDDNPNLPRLVRP |
| | | | | EVDVMCTAFHDNEETFLKKYLYEIARRHPYFY |
| | | | | APELLFFAKRYKAAFTECCQAADKAACLLPKL |
| | | | | DELRDEGKASSAKQRLKCASLQKFGERAFKA |
| | | | | WAVARLSQRFPKAEFAEVSKLVTDLTKVHTEC |
| | | | | CHGDLLECADDRADLAKYICENQDSISSKLKE |
| | | | | CCEKPLLEKSHCIAEVENDEMPADLPSLAADFV |
| | | | | ESKDVCKNYAEAKDVFLGMFLYEYARRHPDY |
| | | | | SVVLLLRLAKTYETTLEKCCAAADPHECYAKV |
| | | | | FDEFKPLVEEPQNLIKQNCELFEQLGEYKFQNA |
| | | | | LLVRYTKKVPQVSTPTLVEVSRNLGKVGSKCC |
| | | | | KHPEAKRMPCAEDYLSVVLNQLCVLHEKTPVS |
| | | | | DRVTKCCTESLVNRRPCFSALEVDETYVPKEF |
| | | | | NAETFTFHADICTLSEKERQIKKQTALVELVKH |
| | | | | KPKATKEQLKAVMDDFAAFVEKCCKADDKET |
| | | | | CFAEEGKKLVAASQAALGLGGGGSGGGGSGG |
| | | | | GGSEVQLLESGGGVVQPGRSLRLSCAASGFTFS |
| | | | | SYGMGWVRQAPGKGLEWVAVISYDGSNKYY |
| | | | | ADSVKGRFTISRDNSKNTLYLQMNSLRAEDTA |
| | | | | VYYCAREGAHFGSGSYYPLYYYYAMDVWGQ |
| | | | | GTTVTVSSGGGGSGGGGSGGGGSELTLTQSPG |
| | | | | TLSLSPGERATLSCRASQSVSSSYLAWYQQKPG |
| | | | | QAPRLLIYGASIRATGIPDRFSGSGSGTDFTLTIS |
| | | | | RLEPEDFAVYYCQQYGSSPIFTFGPGTKVEIKS |
| | | | | GGGGSEVQLVESGGGLVQPGGSLKLSCAASGF |
| | | | | TFNKYAMNWVRQAPGKCLEWVARIRSKYNN |
| | | | | YATYYADSVKDRFTISRDDSKNTAYLQMNNL |
| | | | | KTEDTAVYYCVRHGNFGNSYISYWAYWGQGT |
| | | | | LVTVSSGGGGSGGGGSGGGGSQTVVTQEPSLT |
| | | | | VSPGGTVTLTCGSSTGAVTSGNYPNWVQQKPG |
| | | | | QAPRGLIGGTKFLAPGTPARFSGSLLGGKAALT |
| | | | | LSGVQPEDEAEYYCVLWYSNRWVFGCGTKLT |
| | | | | VL |
| 432. | CH3 15- | artificial | Aa | NIAYGVAGTNYNQKFQG |
| | E11_1_VAG_CC - | | | |
| | HCDR2 | | | |
| 433. | CH3 15- | artificial | Aa | QVQLVQSGAEVKKPGASVKVSCKASGYTFTN |
| | E11_1_VAG_CC - | | | YWMNWVRQAPGQCLEWMGNIAYGVAGTNY |
| | VH | | | NQKFQGRVTMTVDTSSSTAYMELSRLRSDDTA |
| | | | | VYYCATRYFYVMDYWGQGTLVTVSS |
| 434. | CH3 15- | artificial | Aa | QVQLVQSGAEVKKPGASVKVSCKASGYTFTN |
| | E11_1_VAG_CC | | | YWMNWVRQAPGQCLEWMGNIAYGVAGTNY |
| | x I2L x G4 x scFc | | | NQKFQGRVTMTVDTSSSTAYMELSRLRSDDTA |
| | x G4 x MS 15- | | | VYYCATRYFYVMDYWGQGTLVTVSSGGGGQ |
| | B12 CC x I2L | | | GGGGQGGGGQDIQMTQSPSSLSASVGDRVTIT |
| | clipopt_DI | | | CRASQDISNYLNWYQQKPGKVPKLLIYYTSRL |
| | | | | HSGVPSRFSGSGSGTDFTLTISSLQPEDVATYYC |
| | | | | VQYAQFPLTFGCGTKVEIKSGGGGQEVQLVES |
| | | | | GGGLVQPGGSLKLSCAASGFTFNKYAMNWVR |
| | | | | QAPGKGMEWVARIRSKYNNYATYYADAVKD |
| | | | | RFTISRDDSKNTLYLQMNNLKTEDTAVYYCVR |
| | | | | AGNFGSSYISYFAYWGQGTLVTVSSGGGGQGG |
| | | | | GGQGGGGQQTVVTQEPSLTVSPGGTVTITCGS |
| | | | | STGAVTSGNYPNWIQKKPGQAPRGLIGGTKFL |
| | | | | APGTPARFSGSLEGGKAALTLSGVQPEDEAEY |
| | | | | YCVLYYSNRWVFGSGTKLTVLGGGGCPPCPAP |
| | | | | ELLGGPSVFLFPPKPKDTLMISRTPEVTCVVVD |
| | | | | VSHEEPEVKFNWYVDGVEVHNAKTKPCEEQY |
| | | | | GSTYRCVSVLTVLHQDWLNGKEYKCKVSNKA |
| | | | | LPAPIEKTISKAKGQPREPQVYTLPPSREEMTK |
| | | | | NQVSLTCLVKGFYPSDIAVEWESNGQPENNYK |
| | | | | TTPPVLDSDGSFFLYSKLTVDKSRWQQGNVFS |
| | | | | CSVMHEALHNHYTQKSLSLSPGKGGGGQGGG |
| | | | | GQGGGGQGGGGQGGGGQGGGGQCPPCPAPEL |
| | | | | LGGPSVFLFPPKPKDTLMISRTPEVTCVVVDVS |
| | | | | HEEPEVKFNWYVDGVEVHNAKTKPCEEQYGS |
| | | | | TYRCVSVLTVLHQDWLNGKEYKCKVSNKALP |
| | | | | APIEKTISKAKGQPREPQVYTLPPSREEMTKNQ |
| | | | | VSLTCLVKGFYPSDIAVEWESNGQPENNYKTT |
| | | | | PPVLDSDGSFFLYSKLTVDKSRWQQGNVFSCS |
| | | | | VMHEALHNHYTQKSLSLSPGKGGGGQVQLQE |
| | | | | SGPGLVKPSETLSLTCTVSGGSISSSSYFWGWIR |
| | | | | QPPGKCLEWIGNIYYSGSSNYNPSLKSRVTISV |
| | | | | DTSKNQFSLKLSSVTAADTAVYYCARLPRGDR |
| | | | | DAFDIWGQGTMVTVSSGGGGQGGGGQGGGG |
| | | | | QDIVMTQSPSSLSASVGDRVTITCRASQGISNY |
| | | | | LAWYQQKPGKVPKLLIYAASTLQSGVPSRFSG |
| | | | | SGSGTDFTLTISSLQPEDFATYYCQQSYSTPFTF |
| | | | | GCGTKVEIKSGGGGQEVQLVESGGGLVQPGGS |
| | | | | LKLSCAASGFTFNKYAMNWVRQAPGKGMEW |
| | | | | VARIRSKYNNYATYYADAVKDRFTISRDDSKN |
| | | | | TLYLQMNNLKTEDTAVYYCVRAGNFGSSYISY |
| | | | | FAYWGQGTLVTVSSGGGGQGGGGQGGGGQQ |
| | | | | TVVTQEPSLTVSPGGTVTITCGSSTGAVTSGNY |
| | | | | PNWIQKKPGQAPRGLIGGTKFLAPGTPARFSGS |
| | | | | LEGGKAALTLSGVQPEDEAEYYCVLYYSNRW |
| | | | | VFGSGTKLTVL |
| 435. | CH3 15- | artificial | Aa | QVQLVQSGAEVKKPGASVKVSCKASGYTFTN |
| | E11_1_VAG_CC | | | YWMNWVRQAPGQCLEWMGNIAYGVAGTNY |
| | x I2L x G4 x scFc | | | NQKFQGRVTMTVDTSSSTAYMELSRLRSDDTA |
| | x G4 x MS 15- | | | VYYCATRYFYVMDYWGQGTLVTVSSGGGGQ |
| | B12 CC x I2L | | | GGGGQGGGGQEIQMTQSPSSLSASVGDRVTIT |
| | clipopt_EI | | | CRASQDISNYLNWYQQKPGKVPKLLIYYTSRL |
| | | | | HSGVPSRFSGSGSGTDFTLTISSLQPEDVATYYC |
| | | | | VQYAQFPLTFGCGTKVEIKSGGGGQEVQLVES |
| | | | | GGGLVQPGGSLKLSCAASGFTFNKYAMNWVR |
| | | | | QAPGKGMEWVARIRSKYNNYATYYADAVKD |
| | | | | RFTISRDDSKNTLYLQMNNLKTEDTAVYYCVR |
| | | | | AGNFGSSYISYFAYWGQGTLVTVSSGGGGQGG |
| | | | | GGQGGGGQQTVVTQEPSLTVSPGGTVTITCGS |
| | | | | STGAVTSGNYPNWIQKKPGQAPRGLIGGTKFL |
| | | | | APGTPARFSGSLEGGKAALTLSGVQPEDEAEY |
| | | | | YCVLYYSNRWVFGSGTKLTVLGGGGCPPCPAP |
| | | | | ELLGGPSVFLFPPKPKDTLMISRTPEVTCVVVD |
| | | | | VSHEEPEVKFNWYVDGVEVHNAKTKPCEEQY |
| | | | | GSTYRCVSVLTVLHQDWLNGKEYKCKVSNKA |
| | | | | LPAPIEKTISKAKGQPREPQVYTLPPSREEMTK |
| | | | | NQVSLTCLVKGFYPSDIAVEWESNGQPENNYK |
| | | | | TTPPVLDSDGSFFLYSKLTVDKSRWQQGNVFS |
| | | | | CSVMHEALHNHYTQKSLSLSPGKGGGGQGGG |
| | | | | GQGGGGQGGGGQGGGGQGGGGQCPPCPAPEL |
| | | | | LGGPSVFLFPPKPKDTLMISRTPEVTCVVVDVS |
| | | | | HEEPEVKFNWYVDGVEVHNAKTKPCEEQYGS |
| | | | | TYRCVSVLTVLHQDWLNGKEYKCKVSNKALP |
| | | | | APIEKTISKAKGQPREPQVYTLPPSREEMTKNQ |
| | | | | VSLTCLVKGFYPSDIAVEWESNGQPENNYKTT |
| | | | | PPVLDSDGSFFLYSKLTVDKSRWQQGNVFSCS |
| | | | | VMHEALHNHYTQKSLSLSPGKGGGGQVQLQE |
| | | | | SGPGLVKPSETLSLTCTVSGGSISSSSYFWGWIR |
| | | | | QPPGKCLEWIGNIYYSGSSNYNPSLKSRVTISV |
| | | | | DTSKNQFSLKLSSVTAADTAVYYCARLPRGDR |
| | | | | DAFDIWGQGTMVTVSSGGGGQGGGGQGGGG |
| | | | | QEIVMTQSPSSLSASVGDRVTITCRASQGISNYL |
| | | | | AWYQQKPGKVPKLLIYAASTLQSGVPSRFSGS |
| | | | | GSGTDFTLTISSLQPEDFATYYCQQSYSTPFTFG |
| | | | | CGTKVEIKSGGGGQEVQLVESGGGLVQPGGSL |
| | | | | KLSCAASGFTFNKYAMNWVRQAPGKGMEWV |
| | | | | ARIRSKYNNYATYYADAVKDRFTISRDDSKNT |
| | | | | LYLQMNNLKTEDTAVYYCVRAGNFGSSYISYF |
| | | | | AYWGQGTLVTVSSGGGGQGGGGQGGGGQQT |
| | | | | VVTQEPSLTVSPGGTVTITCGSSTGAVTSGNYP |
| | | | | NWIQKKPGQAPRGLIGGTKFLAPGTPARFSGSL |
| | | | | EGGKAALTLSGVQPEDEAEYYCVLYYSNRWV |
| | | | | FGSGTKLTVL |
| 436. | I2M - HCDR1 | artificial | Aa | KYAMN |
| 437. | I2M - HCDR2 | artificial | Aa | RIRSKYNNYATYYADAVKD |
| 438. | I2M - HCDR3 | artificial | Aa | AGNFGTSYISYWAY |
| 439. | I2M - LCDR1 | artificial | Aa | GSSTGAVTSGNYPN |
| 440. | I2M - LCDR2 | artificial | Aa | GTKFLAP |
| 441. | I2M - LCDR3 | artificial | Aa | VLWYSNRWV |
| 442. | I2M - VH | artificial | Aa | EVQLVESGGGLVQPGGSLKLSCAASGFTFNKY |
| | | | | AMNWVRQAPGKGMEWVARIRSKYNNYATYY |
| | | | | ADAVKDRFTISRDDSKNTLYLQMNNLKTEDTA |
| | | | | VYYCVRAGNFGTSYISYWAYWGQGTLVTVSS |
| 443. | I2M - VL | artificial | Aa | QTVVTQEPSLTVSPGGTVTITCGSSTGAVTSGN |
| | | | | YPNWVQKKPGQAPRGLIGGTKFLAPGTPARFS |
| | | | | GSLSGGKAALTLSGVQPEDEAEYYCVLWYSN |
| | | | | RWVFGSGTKLTVL |
| 444. | IgG4 subtype | artificial | Aa | ESKYGPPCPSCP |
| | hinge | | | |
| 445. | IgG1 subtype | artificial | Aa | EPKSCDKTHTCPPCP |
| | hinge | | | |
| 446. | EpCAM_19124- | artificial | Aa | RYDMH |
| | A6_CC - HCDR1 | | | |
| 447 | EpCAM_19124- | artificial | Aa | IISYDGSNKYYGDAVKG |
| | A6_CC - HCDR2 | | | |
| 448. | EpCAM_19124- | artificial | Aa | RAGFQFDF |
| | A6_CC - HCDR3 | | | |
| 449. | EpCAM_19124- | artificial | Aa | TGTSSDVGGYNYVS |
| | A6_CC - LCDR1 | | | |
| 450. | EpCAM_19124- | artificial | Aa | DVSSRPS |
| | A6_CC - LCDR2 | | | |
| 451. | EpCAM_19124- | artificial | Aa | SSYTSSSTWV |
| | A6_CC - LCDR3 | | | |
| 452. | EpCAM_19124- | artificial | Aa | QVQLVESGGGVVQPGRSLRLSCAASGFTFSR |
| | A6_CC - VH | | | YDMHWVRQAPGQCLEWMAIISYDGSNKYYG |
| | | | | DAVKGRFTISRDNSRNTLYLQMNSLRAEDTAV |
| | | | | YHCVKRAGFQFDFWGQGTLVTVSS |
| 453. | EpCAM_19124- | artificial | Aa | QSALTQPPSVSGSPGQSITISCTGTSSDVGGY |
| | A6_CC - VL | | | NYVSWYQQHPGKAPKLMIYDVSSRPSGVSNR |
| | | | | FSGSKSGNTASLTISGLQAEDEADYYCSSYTS |
| | | | | SSTWVFGCGTKLTVL |
| 454. | EpCAM_19124- | artificial | Aa | DYGMH |
| | B5_CC - HCDR1 | | | |
| 455. | EpCAM_19124- | artificial | Aa | GISWNSGNIGYADSVKG |
| | B5_CC - HCDR2 | | | |
| 456. | EpCAM_19124- | artificial | Aa | PDCSSTSCYRGYYFDY |
| | B5_CC - HCDR3 | | | |
| 457. | EpCAM_19124- | artificial | Aa | GGNNIGSKSVH |
| | B5_CC - LCDR1 | | | |
| 458. | EpCAM_19124- | artificial | Aa | DVSDRPS |
| | B5_CC - LCDR2 | | | |
| 459. | EpCAM_19124- | artificial | Aa | QVWDSNTDHVV |
| | B5_CC - LCDR3 | | | |
| 460. | EpCAM_19124- | artificial | Aa | EVQLVESGGGLVQPGRSLRLSCAASGFTFDD |
| | B5_CC - VH | | | YGMHWVRQAPGKCLEWVSGISWNSGNIGYA |
| | | | | DSVKGRFTISRDNAKNSLYLQMNSLRAEDTAL |
| | | | | YYCAKPDCSSTSCYRGYYFDYWGQGTLVTVS |
| | | | | S |
| 461. | EpCAM_19124- | artificial | Aa | SYVLTQPASVSVAPGQTARITCGGNNIGSKSV |
| | B5_CC - VL | | | HWYQQKPGQAPILVVYDVSDRPSGIPERFSG |
| | | | | SNSGNTATLTISRVEAGDEADYYCQVWDSNT |
| | | | | DHVVFGCGTKLTVL |
| 462. | EpCAM_19124- | artificial | Aa | SYAII |
| | C5_CC - | | | |
| | HCDR1 | | | |
| 463. | EpCAM_19124- | artificial | Aa | GIIPMFGTANYAQKFQG |
| | C5_CC - | | | |
| | HCDR2 | | | |
| 464. | EpCAM_19124- | artificial | Aa | VSGTYHWGY |
| | C5_CC - | | | |
| | HCDR3 | | | |
| 465. | EpCAM_19124- | artificial | Aa | TGTSSDVGGYNYVS |
| | C5_CC - LCDR1 | | | |
| 466. | EpCAM_19124- | artificial | Aa | DVSARPS |
| | C5_CC - LCDR2 | | | |
| 467. | EpCAM_19124- | artificial | Aa | SSYISSTSLV |
| | C5_CC - LCDR3 | | | |
| 468. | EpCAM_19124- | artificial | Aa | QVQLVQSGAEVKKPGSSVKVSCKASGGTFSS |
| | C5_CC - VH | | | YAIIWVRQAPGQCLEWMGGIIPMFGTANYAQK |
| | | | | FQGRVTITADESTSTAYMELSSLRSEDTAVYY |
| | | | | CARVSGTYHWGYWGQGTLVTVSS |
| 469. | EpCAM_19124- | artificial | Aa | QSALTQPASVSGSPGQSITISCTGTSSDVGGY |
| | C5_CC - VL | | | NYVSWYQQHPGKAPKLMIYDVSARPSGVSNR |
| | | | | FSGSKSGNTASLTISGLQAEDEADYYCSSYIS |
| | | | | STSLVFGCGTKLTVL |
| 470. | EpCAM_19124- | artificial | Aa | NYDMN |
| | C7_N67Q_CC - | | | |
| | HCDR1 | | | |
| 471. | EpCAM_19124- | artificial | Aa | VISYDGSQKSYSDSVKG |
| | C7_N67Q_CC - | | | |
| | HCDR2 | | | |
| 472. | EpCAM_19124- | artificial | Aa | RGATPFDY |
| | C7_N67Q_CC - | | | |
| | HCDR3 | | | |
| 473. | EpCAM_19124- | artificial | Aa | TGTSNDVGGYNYVS |
| | C7_N67Q_CC - | | | |
| | LCDR1 | | | |
| 474. | EpCAM_19124- | artificial | Aa | DVSSRPS |
| | C7_N67Q_CC - | | | |
| | LCDR2 | | | |
| 475. | EpCAM_19124- | artificial | Aa | SSYARSRTFVA |
| | C7_N67Q_CC - | | | |
| | LCDR3 | | | |
| 476. | EpCAM_19124- | artificial | Aa | QVQLVESGGGVLQPGRSLRLSCAASGFTFRN |
| | C7_N67Q_CC - | | | YDMNWVRQVPGKCLEWVAVISYDGSQKSYS |
| | VH | | | DSVKGRFTISRDNSKNTLSLQMNSLRNEDTAV |
| | | | | YYCAKRGATPFDYWGQGTLVTVSS |
| 477. | EpCAM_19124- | artificial | Aa | QSALTQPASVSGSPGQSITISCTGTSNDVGGY |
| | C7_N67Q_CC - | | | NYVSWYQQHPGKAPKLMIYDVSSRPSGISNR |
| | VL | | | FSGSKSGNTASLTISGLQAEDEADYYCSSYAR |
| | | | | SRTFVAFGCGTKLTVL |
| 478. | EpCAM_19124- | artificial | Aa | NYDMN |
| | C7_S69Y_CC - | | | |
| | HCDR1 | | | |
| 479. | EpCAM_19124- | artificial | Aa | VISYDGSNKYYSDSVKG |
| | C7_S69Y_CC - | | | |
| | HCDR2 | | | |
| 480. | EpCAM_19124- | artificial | Aa | RGATPFDY |
| | C7_S69Y_CC - | | | |
| | HCDR3 | | | |
| 481. | EpCAM_19124- | artificial | Aa | TGTSNDVGGYNYVS |
| | C7_S69Y_CC - | | | |
| | LCDR1 | | | |
| 482. | EpCAM_19124- | artificial | Aa | DVSSRPS |
| | C7_S69Y_CC - | | | |
| | LCDR2 | | | |
| 483. | EpCAM_19124- | artificial | Aa | SSYARSRTFVA |
| | C7_S69Y_CC - | | | |
| | LCDR3 | | | |
| 484. | EpCAM_19124- | artificial | Aa | QVQLVESGGGVLQPGRSLRLSCAASGFTFRN |
| | C7_S69Y_CC - | | | YDMNWVRQVPGKCLEWVAVISYDGSNKYYS |
| | VH | | | DSVKGRFTISRDNSKNTLSLQMNSLRNEDTAV |
| | | | | YYCAKRGATPFDYWGQGTLVTVSS |
| 485. | EpCAM_19124- | artificial | Aa | QSALTQPASVSGSPGQSITISCTGTSNDVGGY |
| | C7_S69Y CC - | | | NYVSWYQQHPGKAPKLMIYDVSSRPSGISNR |
| | VL | | | FSGSKSGNTASLTISGLQAEDEADYYCSSYAR |
| | | | | SRTFVAFGCGTKLTVL |
| 486. | EpCAM_19124- | artificial | Aa | NYDMN |
| | D3_CC - | | | |
| | HCDR1 | | | |
| 487. | EpCAM_19124- | artificial | Aa | VISYDGSDKHYTDSVKG |
| | D3_CC - | | | |
| | HCDR2 | | | |
| 488. | EpCAM_19124- | artificial | Aa | RGATPVDY |
| | D3_CC - | | | |
| | HCDR3 | | | |
| 489. | EpCAM_19124- | artificial | Aa | KSSQSLLHSNGYNYLG |
| | D3_CC - LCDR1 | | | |
| 490. | EpCAM_19124- | artificial | Aa | FGSSRAS |
| | D3_CC - LCDR2 | | | |
| 491. | EpCAM_19124- | artificial | Aa | MQALQTPFT |
| | D3_CC - LCDR3 | | | |
| 492. | EpCAM_19124- | artificial | Aa | QVQLVESGGGVVQPGRSLRLSCAASGFTFRN |
| | D3_CC - VH | | | YDMNWVRQAPGKCLEWVAVISYDGSDKHYT |
| | | | | DSVKGRFTISRDNSKNTLYLQMNSLRTEDTAV |
| | | | | YYCAKRGATPVDYWGQGTLVTVSS |
| 493. | EpCAM_19124- | artificial | Aa | EIVMTQSPLSLPVTPGEPASISCKSSQSLLHSN |
| | D3_CC - VL | | | GYNYLGWYLQKPGQSPQLLIYFGSSRASGVP |
| | | | | DRFSGSGSGTDFTLKISGVEAEDVGVYYCMQ |
| | | | | ALQTPFTFGCGTKVDIK |
| 494. | EpCAM_19124- | artificial | Aa | SYAII |
| | F5_CC - HCDR1 | | | |
| 495. | EpCAM_19124- | artificial | Aa | GIIPIFGTANYAQKFQG |
| | F5_CC - HCDR2 | | | |
| 496. | EpCAM_19124- | artificial | Aa | VSGTYHWGY |
| | F5_CC - HCDR3 | | | |
| 497. | EpCAM_19124- | artificial | Aa | TGTSSDIGSFNLVS |
| | F5_CC - LCDR1 | | | |
| 498. | EpCAM_19124- | artificial | Aa | EGYKRPS |
| | F5_CC - LCDR2 | | | |
| 499. | EpCAM_19124- | artificial | Aa | SSYISSSTLV |
| | F5_CC - LCDR3 | | | |
| 500. | EpCAM_19124- | artificial | Aa | QVQLVQSGAEVKKPGSSVKVSCKVSGGTFSS |
| | F5_CC - VH | | | YAIIWVRQAPGQCLEWMGGIIPIFGTANYAQKF |
| | | | | QGRVTITADESTSTAYMELSSLRSDDTAVYYC |
| | | | | ARVSGTYHWGYWGQGTLVTVSS |
| 501. | EpCAM_19124- | artificial | Aa | QSALTQPPSASGSPGQSITISCTGTSSDIGSFN |
| | F5_CC - VL | | | LVSWYQQHPGKAPKLMIYEGYKRPSGVSDRF |
| | | | | SGSKSGNTASLTISGLQAEDEADYYCSSYISS |
| | | | | STLVFGCGTKLTVL |
| 502. | EpCAM_19124- | artificial | Aa | RYWMS |
| | G7_CC - | | | |
| | HCDR1 | | | |
| 503. | EpCAM_19124- | artificial | Aa | EINPDSSTINYTPSLKD |
| | G7_CC - | | | |
| | HCDR2 | | | |
| 504. | EpCAM_19124- | artificial | Aa | YPWFTY |
| | G7_CC - | | | |
| | HCDR3 | | | |
| 505. | EpCAM_19124- | artificial | Aa | RSSQSLVHSNGNTYLH |
| | G7_CC - LCDR1 | | | |
| 506. | EpCAM_19124- | artificial | Aa | KVSNRFS |
| | G7_CC - LCDR2 | | | |
| 507. | EpCAM_19124- | artificial | Aa | SQSTHVPFT |
| | G7_CC - LCDR3 | | | |
| 508. | EpCAM_19124- | artificial | Aa | EVQLVESGGGLVQPGGSLKLSCAASGFDFSR |
| | G7_CC - VH | | | YWMSWVRQAPGKCLEWIGEINPDSSTINYTP |
| | | | | SLKDKFIVSRDNAKNTLYLQMSKVRSEDTALY |
| | | | | YCARYPWFTYWGQGTLVTVSS |
| 509. | EpCAM_19124- | artificial | Aa | EIVMTQTPLSLPVSLGDQASISCRSSQSLVHS |
| | G7_CC - VL | | | NGNTYLHWYLQKPGQSPKLLIYKVSNRFSGV |
| | | | | PDRFSGSGSGTDFTLKISRVEAEDLGVYFCSQ |
| | | | | STHVPFTFGCGTKLEIK |
| 510. | EpCAM_19124- | artificial | Aa | NYDMN |
| | H1T69Y_CC - | | | |
| | HCDR1 | | | |
| 511. | EpCAM_19124- | artificial | Aa | VISYDGSNKYYTDSVKG |
| | H1T69Y_CC - | | | |
| | HCDR2 | | | |
| 512. | EpCAM_19124- | artificial | Aa | RGATPVDY |
| | H1T69Y_CC - | | | |
| | HCDR3 | | | |
| 513. | EpCAM_19124- | artificial | Aa | RSSQSLLHSNGYNYLG |
| | H1T69Y_CC - | | | |
| | LCDR1 | | | |
| 514. | EpCAM_19124- | artificial | Aa | LGSSRAS |
| | H1T69Y_CC - | | | |
| | LCDR2 | | | |
| 515. | EpCAM_19124- | artificial | Aa | MQALQTPFT |
| | H1T69Y_CC - | | | |
| | LCDR3 | | | |
| 516. | EpCAM_19124- | artificial | Aa | EVQLLESGGGLVQPGRSLRLSCAASGFTFRN |
| | H1T69Y_CC - | | | YDMNWVRQVPGKCLEWVAVISYDGSNKYYT |
| | VH | | | DSVKGRFTISRDNSKNTLYLQMNSLRTEDTAV |
| | | | | YYCAKRGATPVDYWGQGTLVTVSS |
| 517. | EpCAM_19124- | artificial | Aa | EIVMTQSPLSLPVTPGEPASISCRSSQSLLHSN |
| | H1T69Y_CC - | | | GYNYLGWYLQKPGQSPQLLIYLGSSRASGVP |
| | VL | | | DRFSGSGSGTDFTLKISRVEAEDVGVYYCMQ |
| | | | | ALQTPFTFGCGTKLEIK |
| 518. | EpCAM_19124- | artificial | Aa | NYDMN |
| | H1_N67Q_CC - | | | |
| | HCDR1 | | | |
| 519. | EpCAM_19124- | artificial | Aa | VISYDGSQKTYTDSVKG |
| | H1_N67Q_CC - | | | |
| | HCDR2 | | | |
| 520. | EpCAM_19124- | artificial | Aa | RGATPVDY |
| | H1_N67Q_CC - | | | |
| | HCDR3 | | | |
| 521. | EpCAM_19124- | artificial | Aa | RSSQSLLHSNGYNYLG |
| | H1_N67Q_CC - | | | |
| | LCDR1 | | | |
| 522. | EpCAM_19124- | artificial | Aa | LGSSRAS |
| | H1_N67Q_CC - | | | |
| | LCDR2 | | | |
| 523. | EpCAM_19124- | artificial | Aa | MQALQTPFT |
| | H1_N67Q_CC - | | | |
| | LCDR3 | | | |
| 524. | EpCAM_19124- | artificial | Aa | EVQLLESGGGLVQPGRSLRLSCAASGFTFRN |
| | H1_N67Q_CC - | | | YDMNWVRQVPGKCLEWVAVISYDGSQKTYT |
| | VH | | | DSVKGRFTISRDNSKNTLYLQMNSLRTEDTAV |
| | | | | YYCAKRGATPVDYWGQGTLVTVSS |
| 525. | EpCAM_19124- | artificial | Aa | EIVMTQSPLSLPVTPGEPASISCRSSQSLLHSN |
| | H1_N67Q_CC - | | | GYNYLGWYLQKPGQSPQLLIYLGSSRASGVP |
| | VL | | | DRFSGSGSGTDFTLKISRVEAEDVGVYYCMQ |
| | | | | ALQTPFTFGCGTKLEIK |
| 526. | EpCAM_19125- | artificial | Aa | RYDMH |
| | A6_CC - HCDR1 | | | |
| 527. | EpCAM_19125- | artificial | Aa | IISYDGSNKYYGDAVKG |
| | A6_CC - HCDR2 | | | |
| 528. | EpCAM_19125- | artificial | Aa | RAGFQFDF |
| | A6_CC - HCDR3 | | | |
| 529. | EpCAM_19125- | artificial | Aa | TGTSSDVGGYNYVS |
| | A6_CC - LCDR1 | | | |
| 530. | EpCAM_19125- | artificial | Aa | EVSKRPA |
| | A6_CC - LCDR2 | | | |
| 531. | EpCAM_19125- | artificial | Aa | SSYAGSNNWV |
| | A6_CC - LCDR3 | | | |
| 532. | EpCAM_19125- | artificial | Aa | QVQLVESGGGVVQPGRSLRLSCAASGFTFSR |
| | A6_CC - VH | | | YDMHWVRQAPGQCLEWMAIISYDGSNKYYG |
| | | | | DAVKGRFTISRDNSRNTLYLQMNSLRAEDTAV |
| | | | | YHCVKRAGFQFDFWGQGTLVTVSS |
| 533. | EpCAM_19125- | artificial | Aa | QSALTQPPSASGSPGQSVTISCTGTSSDVGG |
| | A6_CC - VL | | | YNYVSWYRQHPGKAPKLMIYEVSKRPAGVPD |
| | | | | RFSGSKSGNTASLTVSGLQAEDEADYYCSSY |
| | | | | AGSNNWVFGCGTKLTVL |
| 534. | EpCAM_19125- | artificial | Aa | RYDMN |
| | G6_C107A_CC - | | | |
| | HCDR1 | | | |
| 535. | EpCAM_19125- | artificial | Aa | FISYDGSNEDYPDAVKG |
| | G6_C107A_CC - | | | |
| | HCDR2 | | | |
| 536. | EpCAM_19125- | artificial | Aa | VGASPFDY |
| | G6_C107A_CC - | | | |
| | HCDR3 | | | |
| 537. | EpCAM_19125- | artificial | Aa | TGTSNDVGGYNYVS |
| | G6_C107A_CC - | | | |
| | LCDR1 | | | |
| 538. | EpCAM_19125- | artificial | Aa | EVSKRPS |
| | G6_C107A_CC - | | | |
| | LCDR2 | | | |
| 539. | EpCAM_19125- | artificial | Aa | ASYTGGRTYVG |
| | G6_C107A_CC - | | | |
| | LCDR3 | | | |
| 540. | EpCAM_19125- | artificial | Aa | QVQLVESGGGVVQPGRSLRLSCAASGFTFSR |
| | G6_C107A_CC - | | | YDMNWVRQAPGKCLEWVAFISYDGSNEDYP |
| | VH | | | DAVKGRFTISRDNSKNTLYLQMNSLRAEDTAV |
| | | | | YYCAKVGASPFDYWGQGTLVTVSS |
| 541. | EpCAM_19125- | artificial | Aa | QSALTQPPSVSGSPGQSITISCTGTSNDVGGY |
| | G6_C107A_CC - | | | NYVSWYQQHPGKAPKLMIYEVSKRPSGVPDR |
| | VL | | | FSGSKSGNTASLTISGLQAEDEADYYCASYTG |
| | | | | GRTYVGFGCGTKLTVL |
| 542. | EpCAM_19125- | artificial | Aa | RYDMN |
| | G6_C107L_CC - | | | |
| | HCDR1 | | | |
| 543. | EpCAM_19125- | artificial | Aa | FISYDGSNEDYPDAVKG |
| | G6_C107L_CC - | | | |
| | HCDR2 | | | |
| 544. | EpCAM_19125- | artificial | Aa | VGASPFDY |
| | G6_C107L_CC - | | | |
| | HCDR3 | | | |
| 545. | EpCAM_19125- | artificial | Aa | TGTSNDVGGYNYVS |
| | G6_C107L_CC - | | | |
| | LCDR1 | | | |
| 546. | EpCAM_19125- | artificial | Aa | EVSKRPS |
| | G6_C107L_CC - | | | |
| | LCDR2 | | | |
| 547. | EpCAM_19125- | artificial | Aa | LSYTGGRTYVG |
| | G6_C107L CC - | | | |
| | LCDR3 | | | |
| 548. | EpCAM_19125- | artificial | Aa | QVQLVESGGGVVQPGRSLRLSCAASGFTFSR |
| | G6_C107L_CC - | | | YDMNWVRQAPGKCLEWVAFISYDGSNEDYP |
| | VH | | | DAVKGRFTISRDNSKNTLYLQMNSLRAEDTAV |
| | | | | YYCAKVGASPFDYWGQGTLVTVSS |
| 549. | EpCAM_19125- | artificial | Aa | QSALTQPPSVSGSPGQSITISCTGTSNDVGGY |
| | G6_C107L_CC - | | | NYVSWYQQHPGKAPKLMIYEVSKRPSGVPDR |
| | VL | | | FSGSKSGNTASLTISGLQAEDEADYYCLSYTG |
| | | | | GRTYVGFGCGTKLTVL |
| 550. | EpCAM_19126- | artificial | Aa | TYTIS |
| | D5_CC - | | | |
| | HCDR1 | | | |
| 551. | EpCAM_19126- | artificial | Aa | GIIPILGAPNYAQKFQG |
| | D5_CC - | | | |
| | HCDR2 | | | |
| 552. | EpCAM_19126- | artificial | Aa | DPFSRY |
| | D5_CC - | | | |
| | HCDR3 | | | |
| 553. | EpCAM_19126- | artificial | Aa | RSSQSLLHSNGYNYLD |
| | D5_CC - LCDR1 | | | |
| 554. | EpCAM_19126- | artificial | Aa | LGSNRAS |
| | D5_CC - LCDR2 | | | |
| 555. | EpCAM_19126- | artificial | Aa | MQALQTPRT |
| | D5_CC - LCDR3 | | | |
| 556. | EpCAM_19126- | artificial | Aa | QVQLVQSGAEVKKPGSSVKVSCKVSGGTFST |
| | D5_CC - VH | | | YTISWVRQAPGQCLEWMGGIIPILGAPNYAQK |
| | | | | FQGRVSITADESTSTSYMELTSLRSEDTAVYY |
| | | | | CARDPFSRYWGQGTLVTVSS |
| 557. | EpCAM_19126- | artificial | Aa | EIVMTQSPLSLPVTPGEPASISCRSSQSLLHSN |
| | D5_CC - VL | | | GYNYLDWYLQKPGQSPQLLIYLGSNRASGVP |
| | | | | DRFSGSGSGTDFTLKISRVEAEDVGVYYCMQ |
| | | | | ALQTPRTFGCGTKVEIK |
| 558. | EpCAM_19127- | artificial | Aa | SYAII |
| | B6_CC - HCDR1 | | | |
| 559. | EpCAM_19127- | artificial | Aa | GIIPMFGTANYAQKFQG |
| | B6_CC - HCDR2 | | | |
| 560. | EpCAM_19127- | artificial | Aa | VSGTYHWGY |
| | B6_CC - HCDR3 | | | |
| 561. | EpCAM_19127- | artificial | Aa | TGTSSDVGGYNYVS |
| | B6_CC - LCDR1 | | | |
| 562. | EpCAM_19127- | artificial | Aa | DVSARPS |
| | B6_CC - LCDR2 | | | |
| 563. | EpCAM_19127- | artificial | Aa | SSYISITTLV |
| | B6_CC - LCDR3 | | | |
| 564. | EpCAM_19127- | artificial | Aa | QVQLVQSGAEVKKPGSSVKVSCKASGGTFRS |
| | B6_CC - VH | | | YAIIWVRQAPGQCLEWMGGIIPMFGTANYAQK |
| | | | | FQGRVTITADESTSTAYMELSRLRSEDTAVYY |
| | | | | CARVSGTYHWGYWGQGTLVTVSS |
| 565. | EpCAM_19127- | artificial | Aa | QSALTQPASVSGSPGQSITISCTGTSSDVGGY |
| | B6_CC - VL | | | NYVSWYQQRPGRAPKLMIYDVSARPSGVSNR |
| | | | | FSGSKSGNTASLTISGLQAEDEADYYCSSYISI |
| | | | | TTLVFGCGTKLTVL |
| 566. | EpCAM_19127- | artificial | Aa | RYDMH |
| | G11_CC - | | | |
| | HCDR1 | | | |
| 567. | EpCAM_19127- | artificial | Aa | IISYDGSIRYYADSVKG |
| | G11_CC - | | | |
| | HCDR2 | | | |
| 568. | EpCAM_19127- | artificial | Aa | RAGFQFDS |
| | G11_CC - | | | |
| | HCDR3 | | | |
| 569. | EpCAM_19127- | artificial | Aa | TGTSSDVGGYNYVS |
| | G11_CC - | | | |
| | LCDR1 | | | |
| 570. | EpCAM_19127- | artificial | Aa | EVSKRPA |
| | G11_CC - | | | |
| | LCDR2 | | | |
| 571. | EpCAM_19127- | artificial | Aa | SSYAGGNNFVV |
| | G11_CC - | | | |
| | LCDR3 | | | |
| 572. | EpCAM_19127- | artificial | Aa | QVQLVESGGGVVQPGRSLRLSCAASGFTFSR |
| | G11_CC - VH | | | YDMHWVRQAPGQCLEWMAIISYDGSIRYYAD |
| | | | | SVKGRFTISRDNSRNTLYLQMNSLRAEDTAVY |
| | | | | YCVKRAGFQFDSWGQGTLVTVSS |
| 573. | EpCAM_19127- | artificial | Aa | QSALTQPPSASGSPGQSVTISCTGTSSDVGG |
| | G11_CC - VL | | | YNYVSWYQQHPGKAPKLMIYEVSKRPAGVPD |
| | | | | RFSGSKSGNTASLTVSGLQAEDEADYYCSSY |
| | | | | AGGNNFVVFGCGTKLTVL |
| 574. | EpCAM_19128- | artificial | Aa | EYWMS |
| | H8_CC - | | | |
| | HCDR1 | | | |
| 575. | EpCAM_19128- | artificial | Aa | EIIPDSSKINYTPSLKD |
| | H8_CC - | | | |
| | HCDR2 | | | |
| 576. | EpCAM_19128- | artificial | Aa | PLYYGYDEGFAY |
| | H8_CC - | | | |
| | HCDR3 | | | |
| 577. | EpCAM_19128- | artificial | Aa | RSSQSLVHSNGNTYLE |
| | H8_CC - LCDR1 | | | |
| 578. | EpCAM_19128- | artificial | Aa | KVSNRFS |
| | H8_CC - LCDR2 | | | |
| 579. | EpCAM_19128- | artificial | Aa | FQGSHVPYT |
| | H8_CC - LCDR3 | | | |
| 580. | EpCAM_19128- | artificial | Aa | EVQLVESGGGLVQPGRSLKLSCAASGFDFSE |
| | H8_CC - VH | | | YWMSWVRQAPGKCLEWIGEIIPDSSKINYTPS |
| | | | | LKDKFIISRDNAKNTLYLQMSKVRSEDTALYYC |
| | | | | ARPLYYGYDEGFAYWGQGTTVTVSS |
| 581. | EpCAM_19128- | artificial | Aa | EIVMTQTPLSLPVSLGDQASISCRSSQSLVHS |
| | H8_CC - VL | | | NGNTYLEWYLQKPGQSPKLLIYKVSNRFSGV |
| | | | | PDRFSGSGSGTDFTLKISRVEAEDLGVYYCFQ |
| | | | | GSHVPYTFGCGTRLEIK |
| 582. | EpCAM_19129- | artificial | Aa | SYAMH |
| | A4_CC - HCDR1 | | | |
| 583. | EpCAM_19129- | artificial | Aa | RVRSKSDNYATYYADSVKD |
| | A4_CC - HCDR2 | | | |
| 584. | EpCAM_19129- | artificial | Aa | PLFTTVEVTNALDY |
| | A4_CC - HCDR3 | | | |
| 585. | EpCAM_19129- | artificial | Aa | SASSSISSNYLH |
| | A4_CC - LCDR1 | | | |
| 586. | EpCAM_19129- | artificial | Aa | RTSVLSS |
| | A4_CC - LCDR2 | | | |
| 587. | EpCAM_19129- | artificial | Aa | QQGSSMPFT |
| | A4_CC - LCDR3 | | | |
| 588. | EpCAM_19129- | artificial | Aa | EVQLVESGGGLVQPKGSLKLSCAASGFTFNS |
| | A4_CC - VH | | | YAMHWVRQAPGRCMEWVGRVRSKSDNYAT |
| | | | | YYADSVKDRFTISRDDSQSMLYLQMNNLKTE |
| | | | | DTAIYYCVRPLFTTVEVTNALDYWGQGTLVTV |
| | | | | SS |
| 589. | EpCAM_19129- | artificial | Aa | EIVLTQSPTTMAASPGEKITITCSASSSISSNYL |
| | A4_CC - VL | | | HWYQQKPGFSPKLLIYRTSVLSSGVPARFSG |
| | | | | SGSGTSYSLTIDTMEAEDVATYFCQQGSSMP |
| | | | | FTFGCGTRLEIK |
| 590. | EpCAM_19129- | artificial | Aa | NYWMQ |
| | E3_CC - HCDR1 | | | |
| 591. | EpCAM_19129- | artificial | Aa | AIYPGEGETRYTQKFKG |
| | E3_CC - HCDR2 | | | |
| 592. | EpCAM_19129- | artificial | Aa | PYAGYYLYAMDQ |
| | E3_CC - HCDR3 | | | |
| 593. | EpCAM_19129- | artificial | Aa | RSSQSIVHSNGNTYLE |
| | E3_CC - LCDR1 | | | |
| 594. | EpCAM_19129- | artificial | Aa | KVSNRFS |
| | E3_CC - LCDR2 | | | |
| 595. | EpCAM_19129- | artificial | Aa | SQSTHVPYT |
| | E3_CC - LCDR3 | | | |
| 596. | EpCAM_19129- | artificial | Aa | QVQLVQSGAELARPGASVKLSCKASGYIFSNY |
| | E3_CC - VH | | | WMQWVKQRPGQCLEWIGAIYPGEGETRYTQ |
| | | | | KFKGKATLTADTSSSTAYMQLSSLASEDSAVY |
| | | | | YCARPYAGYYLYAMDQWGQGTTVTVSS |
| 597. | EpCAM_19129- | artificial | Aa | EIVMTQTPLSLPVSLGDQASISCRSSQSIVHSN |
| | E3_CC - VL | | | GNTYLEWYLQKPGQSPKLLIYKVSNRFSGVP |
| | | | | DRFSGSGSGTDFTLKISRVEAEDLGVYFCSQS |
| | | | | THVPYTFGCGTRLEIK |
| 598. | EpCAM_19130- | artificial | Aa | NYDMN |
| | C11_CC - | | | |
| | HCDR1 | | | |
| 599. | EpCAM_19130- | artificial | Aa | VISYDGSNKYYTDSVKG |
| | C11_CC - | | | |
| | HCDR2 | | | |
| 600. | EpCAM_19130- | artificial | Aa | RGATPVDY |
| | C11_CC - | | | |
| | HCDR3 | | | |
| 601. | EpCAM_19130- | artificial | Aa | RSSQSLLHSNGYNYLG |
| | C11_CC - | | | |
| | LCDR1 | | | |
| 602. | EpCAM_19130- | artificial | Aa | FGSSRAS |
| | C11_CC - | | | |
| | LCDR2 | | | |
| 603. | EpCAM_19130- | artificial | Aa | MQALQTPFT |
| | C11_CC - | | | |
| | LCDR3 | | | |
| 604. | EpCAM_19130- | artificial | Aa | QVQLVESGGGVVQPGRSLRLSCAASGFTFSN |
| | C11_CC - VH | | | YDMNWVRQAPGKCLEWVAVISYDGSNKYYT |
| | | | | DSVKGRFTISRDNSKNTLYLQMNSLRTEDTAV |
| | | | | YYCAKRGATPVDYWGQGTLVTVSS |
| 605. | EpCAM_19130- | artificial | Aa | EIVMTQSPLSLPVTPGEPASISCRSSQSLLHSN |
| | C11_CC - VL | | | GYNYLGWYLQKPGQSPQLLIYFGSSRASGVP |
| | | | | DRFSGSGSGTDFTLKISGVEAEDVGVYYCMQ |
| | | | | ALQTPFTFGCGTKVDIK |
| 606. | EpCAM_19131- | artificial | Aa | RYDMH |
| | B6_CC - HCDR1 | | | |
| 607. | EpCAM_19131- | artificial | Aa | FISYDGSNEDYPDAVKG |
| | B6_CC - HCDR2 | | | |
| 608. | EpCAM_19131- | artificial | Aa | VGASPFDY |
| | B6_CC - HCDR3 | | | |
| 609. | EpCAM_19131- | artificial | Aa | TGTSSDVGGYNYVS |
| | B6_CC - LCDR1 | | | |
| 610. | EpCAM_19131- | artificial | Aa | EVSKRPS |
| | B6_CC - LCDR2 | | | |
| 611. | EpCAM_19131- | artificial | Aa | TSYAGSNNLV |
| | B6_CC - LCDR3 | | | |
| 612. | EpCAM_19131- | artificial | Aa | QVQLVESGGGVVQPGRSLRLSCAASGFTFSR |
| | B6_CC - VH | | | YDMHWVRQAPGKCLEWVAFISYDGSNEDYP |
| | | | | DAVKGRFTISRDNSKNTLYLQMNSLRAEDTAV |
| | | | | YYCAKVGASPFDYWGQGTLVTVSS |
| 613. | EpCAM_19131- | artificial | Aa | QSALTQPASVSGSPGRSVTISCTGTSSDVGG |
| | B6_CC - VL | | | YNYVSWYQQHPGKAPKLMIYEVSKRPSGVPV |
| | | | | RFSGSKSDNTASLTVSGLQAEDEADYYCTSY |
| | | | | AGSNNLVFGCGTKLTVL |
| 614. | EpCAM_19131- | artificial | Aa | NYDMN |
| | H3_hu_N67Q_C | | | |
| | C - HCDR1 | | | |
| 615. | EpCAM_19131- | artificial | Aa | VISYDGSQKSYSDSVKG |
| | H3_hu_N67Q_C | | | |
| | C - HCDR2 | | | |
| 616. | EpCAM_19131- | artificial | Aa | RGATPFDY |
| | H3_hu_N67Q_C | | | |
| | C - HCDR3 | | | |
| 617. | EpCAM_19131- | artificial | Aa | SGDKLGDKYAS |
| | H3_hu_N67Q_C | | | |
| | C - LCDR1 | | | |
| 618. | EpCAM_19131- | artificial | Aa | QDSRRPS |
| | H3_hu_N67Q_C | | | |
| | C - LCDR2 | | | |
| 619. | EpCAM_19131- | artificial | Aa | QVWDYSSDHWV |
| | H3_hu_N67Q_C | | | |
| | C - LCDR3 | | | |
| 620. | EpCAM_19131- | artificial | Aa | QVQLVESGGGVVQPGRSLRLSCAASGFTFRN |
| | H3_hu_N67Q_C | | | YDMNWVRQAPGKCLEWVAVISYDGSQKSYS |
| | C - VH | | | DSVKGRFTISRDNSKNTLSLQMNSLRNEDSAV |
| | | | | YYCAKRGATPFDYWGQGTLVTVSS |
| 621. | EpCAM_19131- | artificial | Aa | SYELTQPPSVSVSPGQTASITCSGDKLGDKYA |
| | H3_hu_N67Q_C | | | SWYQQKPGQSPVLVIYQDSRRPSGIPERFSG |
| | C - VL | | | SNSGNTATLTISGTQAMDEADYYCQVWDYSS |
| | | | | DHWVFGCGTKLTVL |
| 622. | EpCAM_19132- | artificial | Aa | NYDMN |
| | E12_hu_CC - | | | |
| | HCDR1 | | | |
| 623. | EpCAM_19132- | artificial | Aa | VISYDGSDKHYTDSVKG |
| | E12_hu_CC - | | | |
| | HCDR2 | | | |
| 624. | EpCAM_19132- | artificial | Aa | RGATPVDY |
| | E12_hu_CC - | | | |
| | HCDR3 | | | |
| 625. | EpCAM_19132- | artificial | Aa | SASSSISSNSLH |
| | E12_hu_CC - | | | |
| | LCDR1 | | | |
| 626. | EpCAM_19132- | artificial | Aa | RTSNLAS |
| | E12_hu_CC - | | | |
| | LCDR2 | | | |
| 627. | EpCAM_19132- | artificial | Aa | QQGSSIPRT |
| | E12_hu_CC - | | | |
| | LCDR3 | | | |
| 628. | EpCAM_19132- | artificial | Aa | QVQLVESGGGVVQPGRSLRLSCAASGFTFRN |
| | E12_hu_CC - | | | YDMNWVRQAPGKCLEWVAVISYDGSDKHYT |
| | VH | | | DSVKGRFTISRDNSKNTLFLQMNSLRTEDTAV |
| | | | | YYCAKRGATPVDYWGQGTLVTVSS |
| 629. | EpCAM_19132- | artificial | Aa | EIQMTQSPSSLSASVGDRVTITCSASSSISSNS |
| | E12_hu_CC - VL | | | LHWYQQKPGKAPKLLIYRTSNLASGVPSRFS |
| | | | | GSGSGTDFTLTISSLQPEDFATYYCQQGSSIP |
| | | | | RTFGCGTKLEIK |
| 630. | EpCAM_19143- | artificial | Aa | RYDMN |
| | C11_CC - | | | |
| | HCDR1 | | | |
| 631. | EpCAM_19143- | artificial | Aa | FISYDGSNEDYPDAVKG |
| | C11 CC - | | | |
| | HCDR2 | | | |
| 632. | EpCAM_19143- | artificial | Aa | VGASPFDY |
| | C11_CC - | | | |
| | HCDR3 | | | |
| 633. | EpCAM_19143- | artificial | Aa | RASQSVSSSYLA |
| | C11_CC - | | | |
| | LCDR1 | | | |
| 634. | EpCAM_19143- | artificial | Aa | GASSRAT |
| | C11_CC - | | | |
| | LCDR2 | | | |
| 635. | EpCAM_19143- | artificial | Aa | QQYGSSPRT |
| | C11_CC - | | | |
| | LCDR3 | | | |
| 636. | EpCAM_19143- | artificial | Aa | QVQLVESGGGVVQPGRSLRLSCAASGFTFSR |
| | C11_CC - VH | | | YDMNWVRQAPGKCLEWVAFISYDGSNEDYP |
| | | | | DAVKGRFTISRDNSKNTLYLQLNSLRAEDTAV |
| | | | | YYCAKVGASPFDYWGQGTLVTVSS |
| 637. | EpCAM_19143- | artificial | Aa | EIVLTQSPGTLSLSPGERATLSCRASQSVSSS |
| | C11_CC - VL | | | YLAWYQQKPGQAPRLLIYGASSRATGIPDRFS |
| | | | | GSGSGTDFTLTISRLEPEDFAVYYCQQYGSSP |
| | | | | RTFGCGTKVEIK |
| 638. | EpCAM_19143- | artificial | Aa | NYDMN |
| | E11_CC - | | | |
| | HCDR1 | | | |
| 639. | EpCAM_19143- | artificial | Aa | VISYDGSNKYYTDSVKG |
| | E11_CC - | | | |
| | HCDR2 | | | |
| 640. | EpCAM_19143- | artificial | Aa | RGATPFDY |
| | E11_CC - | | | |
| | HCDR3 | | | |
| 641. | EpCAM_19143- | artificial | Aa | RASQSVNSNLA |
| | E11_CC - | | | |
| | LCDR1 | | | |
| 642. | EpCAM_19143- | artificial | Aa | GASTRAT |
| | E11_CC - | | | |
| | LCDR2 | | | |
| 643. | EpCAM_19143- | artificial | Aa | QQYNNWPYT |
| | E11_CC - | | | |
| | LCDR3 | | | |
| 644. | EpCAM_19143- | artificial | Aa | QVQLVESGGGVVLPGRSLRLSCAASGFTFRN |
| | E11_CC - VH | | | YDMNWVRQAPGKCLEWVAVISYDGSNKYYT |
| | | | | DSVKGRFTISRDNSRNTLYLQMNSLRTEDTAV |
| | | | | YSCTKRGATPFDYWGQGTLVTVSS |
| 645. | EpCAM_19143- | artificial | Aa | EIVLTQSPATLSVSPGERATLSCRASQSVNSN |
| | E11_CC - VL | | | LAWYQQKPGQAPRLLIYGASTRATGIPARFSG |
| | | | | SGSGTEFTLTISSLQSEDFAVYYCQQYNNWP |
| | | | | YTFGCGTKLEIK |
| 646. | EpCAM_19145- | artificial | Aa | NYDMN |
| | C4_CC - | | | |
| | HCDR1 | | | |
| 647. | EpCAM_19145- | artificial | Aa | VISYDGSDKHYTDSVKG |
| | C4_CC - | | | |
| | HCDR2 | | | |
| 648. | EpCAM_19145- | artificial | Aa | RGATPVDY |
| | C4_CC - | | | |
| | HCDR3 | | | |
| 649. | EpCAM_19145- | artificial | Aa | RSSQSLLHSNGYNYLD |
| | C4_CC - LCDR1 | | | |
| 650. | EpCAM_19145- | artificial | Aa | LGSNRAS |
| | C4_CC - LCDR2 | | | |
| 651. | EpCAM_19145- | artificial | Aa | MQALQAPLT |
| | C4_CC - LCDR3 | | | |
| 652. | EpCAM_19145- | artificial | Aa | QVQLVESGGGVVQPGRSLRLSCAASGFTFRN |
| | C4_CC - VH | | | YDMNWVRQAPGKCLEWVAVISYDGSDKHYT |
| | | | | DSVKGRFTISRDNSKNTLYLQMNSLRTEDTAV |
| | | | | YYCAKRGATPVDYWGQGTLVTVSS |
| 653. | EpCAM_19145- | artificial | Aa | EIVMTQTPLSLPVTPGEPASISCRSSQSLLHSN |
| | C4_CC - VL | | | GYNYLDWYLQKPGQSPQLLIYLGSNRASGVP |
| | | | | DRFSGSGSGTDFTLKISRVEAEDVGVYYCMQ |
| | | | | ALQAPLTFGCGTKVDIK |
| 654. | EpCAM_19145- | artificial | Aa | RYDMN |
| | F12_CC - | | | |
| | HCDR1 | | | |
| 655. | EpCAM_19145- | artificial | Aa | FISYDGSNEDYPDAVKG |
| | F12_CC - | | | |
| | HCDR2 | | | |
| 656. | EpCAM_19145- | artificial | Aa | VGASPFDY |
| | F12_CC - | | | |
| | HCDR3 | | | |
| 657. | EpCAM_19145- | artificial | Aa | RSSQSLLHSNGYNYLG |
| | F12_CC - | | | |
| | LCDR1 | | | |
| 658. | EpCAM_19145- | artificial | Aa | SGSSRAS |
| | F12_CC - | | | |
| | LCDR2 | | | |
| 659. | EpCAM_19145- | artificial | Aa | MQALQTPFT |
| | F12_CC - | | | |
| | LCDR3 | | | |
| 660. | EpCAM_19145- | artificial | Aa | QVQLVESGGGVVQPGRSLRLSCAASGFTFSR |
| | F12_CC - VH | | | YDMNWVRQAPGKCLEWVAFISYDGSNEDYP |
| | | | | DAVKGRFTISRDNSKNTLYLQMNSLRAEDTAV |
| | | | | YYCAKVGASPFDYWGQGTLVTVSS |
| 661. | EpCAM_19145- | artificial | Aa | EIVMTQSPLSLPVTPGEPASISCRSSQSLLHSN |
| | F12_CC - VL | | | GYNYLGWYLQKPGQSPQLLIYSGSSRASGVP |
| | | | | DRFSGSGSGTDFTLKISRVEAEDVGVYYCMQ |
| | | | | ALQTPFTFGCGTKVEIK |
| 662. | EpCAM_19168- | artificial | Aa | RYYMH |
| | H9_CC - | | | |
| | HCDR1 | | | |
| 663. | EpCAM_19168- | artificial | Aa | VIWHDGSNKYYADSVKG |
| | H9_CC - | | | |
| | HCDR2 | | | |
| 664. | EpCAM_19168- | artificial | Aa | EAPSLAY |
| | H9_CC - | | | |
| | HCDR3 | | | |
| 665. | EpCAM_19168- | artificial | Aa | RASQSVSSSYLA |
| | H9_CC - LCDR1 | | | |
| 666. | EpCAM_19168- | artificial | Aa | GASSRAT |
| | H9_CC - LCDR2 | | | |
| 667. | EpCAM_19168- | artificial | Aa | QQYGSSPLT |
| | H9_CC - LCDR3 | | | |
| 668. | EpCAM_19168- | artificial | Aa | QVQLVESGGGVVQPGRSLRLSCAASGFTFSR |
| | H9_CC - VH | | | YYMHWVRQAPGKCPEWVAVIWHDGSNKYYA |
| | | | | DSVKGRFTISRDNSKNTLYLQMNSLRAEDTAV |
| | | | | YYCAREAPSLAYWGQGTLVTVSS |
| 669. | EpCAM_19168- | artificial | Aa | EIVLTQSPGTLSLSPGERATLSCRASQSVSSS |
| | H9_CC - VL | | | YLAWYQQKPGQAPRLLIYGASSRATGIPDRFS |
| | | | | GSGSGTDFTLTISRLEPEDFAVYYCQQYGSSP |
| | | | | LTFGCGTKVEIK |
| 670. | EpCAM_19171- | artificial | Aa | RYYMH |
| | A5_CC - HCDR1 | | | |
| 671. | EpCAM_19171- | artificial | Aa | VIWHDGSNKYYADSVKG |
| | A5_CC - HCDR2 | | | |
| 672. | EpCAM_19171- | artificial | Aa | EAPSLAY |
| | A5_CC - HCDR3 | | | |
| 673. | EpCAM_19171- | artificial | Aa | RASQSVSSSYLA |
| | A5_CC - LCDR1 | | | |
| 674. | EpCAM_19171- | artificial | Aa | GASSRAT |
| | A5_CC - LCDR2 | | | |
| 675. | EpCAM_19171- | artificial | Aa | QQYGSSIT |
| | A5_CC - LCDR3 | | | |
| 676. | EpCAM_19171- | artificial | Aa | QVQLVESGGGVVQPGRSLRLSCAASGFTFSR |
| | A5_CC - VH | | | YYMHWVRQAPGKCPEWVAVIWHDGSNKYYA |
| | | | | DSVKGRFTISRDNSKNTLYLQMNSLRAEDTAV |
| | | | | YYCAREAPSLAYWGQGTLVTVSS |
| 677. | EpCAM_19171- | artificial | Aa | EIVMTQSPGTLSLSPGERATLSCRASQSVSSS |
| | A5_CC - VL | | | YLAWYQQKPGQAPRLLIYGASSRATGIPDRFS |
| | | | | GSGSGTDFTLTISRLEPEDFAVYYCQQYGSSI |
| | | | | TFGCGTRLEIK |
| 678. | EpCAM_19171- | artificial | Aa | RYYMH |
| | D3_CC - | | | |
| | HCDR1 | | | |
| 679. | EpCAM_19171- | artificial | Aa | VIWHDGSNKYYADSVKG |
| | D3_CC - | | | |
| | HCDR2 | | | |
| 680. | EpCAM_19171- | artificial | Aa | EAPSLAY |
| | D3_CC - | | | |
| | HCDR3 | | | |
| 681. | EpCAM_19171- | artificial | Aa | RASQSVSSSYLA |
| | D3_CC - LCDR1 | | | |
| 682. | EpCAM_19171- | artificial | Aa | GASSRAT |
| | D3_CC - LCDR2 | | | |
| 683. | EpCAM_19171- | artificial | Aa | QQYGSSPWT |
| | D3_CC - LCDR3 | | | |
| 684. | EpCAM_19171- | artificial | Aa | QVQLVESGGGVVQPGRSLRLSCAASGFTFSR |
| | D3_CC - VH | | | YYMHWVRQAPGKCPEWVAVIWHDGSNKYYA |
| | | | | DSVKGRFTISRDNSKNTLYLQMNSLRAEDTAV |
| | | | | YYCAREAPSLAYWGQGTLVTVSS |
| 685. | EpCAM_19171- | artificial | Aa | EIVLTQSPGTLSLSPGERATLSCRASQSVSSS |
| | D3_CC - VL | | | YLAWYQQKPGQAPRLLIYGASSRATGIPDRFS |
| | | | | GSGSGTDFTLTISRLEPEDFAVYYCQQYGSSP |
| | | | | WTFGCGTKVEIK |
| 686. | EpCAM 19171- | artificial | Aa | SYYWS |
| | E11_CC - | | | |
| | HCDR1 | | | |
| 687. | EpCAM_19171- | artificial | Aa | RVYTSGSTDYNPSLKS |
| | E11_CC - | | | |
| | HCDR2 | | | |
| 688. | EpCAM_19171- | artificial | Aa | DSGNFWGFLDH |
| | E11_CC - | | | |
| | HCDR3 | | | |
| 689. | EpCAM_19171- | artificial | Aa | RSSQSLLHSNGYNYLD |
| | E11_CC - | | | |
| | LCDR1 | | | |
| 690. | EpCAM_19171- | artificial | Aa | LGSNRAS |
| | E11_CC - | | | |
| | LCDR2 | | | |
| 691. | EpCAM_19171- | artificial | Aa | MQALQTPWT |
| | E11_CC - | | | |
| | LCDR3 | | | |
| 692. | EpCAM_19171- | artificial | Aa | QVQLQESGPGLVKPSETLSLTCTVSGGSISSY |
| | E11_CC - VH | | | YWSWIRQPAGKCLEWIGRVYTSGSTDYNPSL |
| | | | | KSRVTMSLDTSKSQFSLKLRSVTAADTAVYYC |
| | | | | ARDSGNFWGFLDHWGQGTLVTVSS |
| 693. | EpCAM_19171- | artificial | Aa | EIVLTQSPLSLPVTPGEPASISCRSSQSLLHSN |
| | E11_CC - VL | | | GYNYLDWYLQKPGQSPQLLIYLGSNRASGVP |
| | | | | DRFSGSGSGTDFTLKISRVEAEDVGIYYCMQA |
| | | | | LQTPWTFGCGTKVEIK |
| 694. | EpCAM_19180- | artificial | Aa | NYDMN |
| | B12_CC - | | | |
| | HCDR1 | | | |
| 695. | EpCAM_19180- | artificial | Aa | VISYDGSNKYYTDSVKG |
| | B12_CC - | | | |
| | HCDR2 | | | |
| 696. | EpCAM_19180- | artificial | Aa | RGATPFDY |
| | B12_CC - | | | |
| | HCDR3 | | | |
| 697. | EpCAM_19180- | artificial | Aa | TGTNSDVGSYNLVS |
| | B12_CC - | | | |
| | LCDR1 | | | |
| 698. | EpCAM_19180- | artificial | Aa | DVSHRPS |
| | B12_CC - | | | |
| | LCDR2 | | | |
| 699. | EpCAM_19180- | artificial | Aa | SSYISSSSLV |
| | B12_CC - | | | |
| | LCDR3 | | | |
| 700. | EpCAM_19180- | artificial | Aa | EVQLLESGGGLVQPGGSLRLSCAASGFTFRN |
| | B12_CC - VH | | | YDMNWVRQAPGKCLEWVAVISYDGSNKYYT |
| | | | | DSVKGRFTISRDNSRNTLYLQMNSLRTEDTAV |
| | | | | YSCTKRGATPFDYWGQGTLVTVSS |
| 701. | EpCAM_19180- | artificial | Aa | QSALTQPPSVSGSPGQSITISCTGTNSDVGSY |
| | B12_CC - VL | | | NLVSWYQQHPGKTPKLMIYDVSHRPSGVSNR |
| | | | | FSGSKSGNTASLTISGLQAEDEADYYCSSYIS |
| | | | | SSSLVFGCGTKLTVL |
| 702. | EpCAM_19180- | artificial | Aa | NYDMN |
| | B6_N67Q_CC - | | | |
| | HCDR1 | | | |
| 703. | EpCAM_19180- | artificial | Aa | VISYDGSQKSYSDSVKG |
| | B6_N67Q_CC - | | | |
| | HCDR2 | | | |
| 704. | EpCAM_19180- | artificial | Aa | RGATPFDY |
| | B6_N67Q_CC - | | | |
| | HCDR3 | | | |
| 705. | EpCAM_19180- | artificial | Aa | GGNNIGSKNVH |
| | B6_N67Q_CC - | | | |
| | LCDR1 | | | |
| 706. | EpCAM_19180- | artificial | Aa | RDSKRPS |
| | B6_N67Q_CC - | | | |
| | LCDR2 | | | |
| 707. | EpCAM_19180- | artificial | Aa | QAWDRSTAV |
| | B6_N67Q_CC - | | | |
| | LCDR3 | | | |
| 708. | EpCAM_19180- | artificial | Aa | EVQLLESGGGSAQPGGSLRLSCVASGFTFRN |
| | B6_N67Q_CC - | | | YDMNWVRQAPGKCLEWVAVISYDGSQKSYS |
| | VH | | | DSVKGRFTISRDNSKNTLSLQMNSLRNEDTAV |
| | | | | YYCAKRGATPFDYWGQGTLVTVSS |
| 709. | EpCAM_19180- | artificial | Aa | SYELTQPPSVSVAPGQTARITCGGNNIGSKNV |
| | B6_N67Q_CC - | | | HWYQQKPGQAPVLVIYRDSKRPSGIPERFSG |
| | VL | | | SNSGNTATLTISGTQAMDEADYYCQAWDRST |
| | | | | AVFGCGTKLTVL |
| 710. | EpCAM_19180- | artificial | Aa | NYDMN |
| | D10S69Y_CC - | | | |
| | HCDR1 | | | |
| 711. | EpCAM_19180- | artificial | Aa | VISYDGSNKYYSDSVKG |
| | D10S69Y_CC - | | | |
| | HCDR2 | | | |
| 712. | EpCAM_19180- | artificial | Aa | RGATPFDY |
| | D10S69Y_CC - | | | |
| | HCDR3 | | | |
| 713. | EpCAM_19180- | artificial | Aa | TGTSSDVGGYNYVS |
| | D10S69Y_CC - | | | |
| | LCDR1 | | | |
| 714. | EpCAM_19180- | artificial | Aa | DVSVRPS |
| | D10S69Y_CC - | | | |
| | LCDR2 | | | |
| 715. | EpCAM_19180- | artificial | Aa | SSYISSTTLV |
| | D10S69Y_CC - | | | |
| | LCDR3 | | | |
| 716. | EpCAM_19180- | artificial | Aa | QVQLVESGGGVVQPGRSLRLSCAASGFTFRN |
| | D10S69Y_CC - | | | YDMNWVRQAPGKCLEWVAVISYDGSNKYYS |
| | VH | | | DSVKGRFTISRDNSKNTLSLQMNSLRNEDTAV |
| | | | | YYCAKRGATPFDYWGQGTLVTVSS |
| 717. | EpCAM_19180- | artificial | Aa | QSALTQPPSASGSPGQSITISCTGTSSDVGGY |
| | D10S69Y_CC - | | | NYVSWYQQHPGKAPKLMIYDVSVRPSGVSNR |
| | VL | | | FSGSKSGNTASLTISGLQAEDEADYYCSSYIS |
| | | | | STTLVFGCGTKLTVL |
| 718. | EpCAM_19180- | artificial | Aa | NYDMN |
| | D10_N67Q_CC - | | | |
| | HCDR1 | | | |
| 719. | EpCAM_19180- | artificial | Aa | VISYDGSQKSYSDSVKG |
| | D10_N67Q_CC - | | | |
| | HCDR2 | | | |
| 720. | EpCAM_19180- | artificial | Aa | RGATPFDY |
| | D10_N67Q_CC - | | | |
| | HCDR3 | | | |
| 721. | EpCAM_19180- | artificial | Aa | TGTSSDVGGYNYVS |
| | D10_N67Q_CC- | | | |
| | LCDR1 | | | |
| 722. | EpCAM_19180- | artificial | Aa | DVSVRPS |
| | D10_N67Q_CC- | | | |
| | LCDR2 | | | |
| 723. | EpCAM_19180- | artificial | Aa | SSYISSTTLV |
| | D10_N67Q_CC- | | | |
| | LCDR3 | | | |
| 724. | EpCAM_19180- | artificial | Aa | QVQLVESGGGVVQPGRSLRLSCAASGFTFRN |
| | D10_N67Q_CC- | | | YDMNWVRQAPGKCLEWVAVISYDGSQKSYS |
| | VH | | | DSVKGRFTISRDNSKNTLSLQMNSLRNEDTAV |
| | | | | YYCAKRGATPFDYWGQGTLVTVSS |
| 725. | EpCAM_19180- | artificial | Aa | QSALTQPPSASGSPGQSITISCTGTSSDVGGY |
| | D10_N67Q_CC- | | | NYVSWYQQHPGKAPKLMIYDVSVRPSGVSNR |
| | VL | | | FSGSKSGNTASLTISGLQAEDEADYYCSSYIS |
| | | | | STTLVFGCGTKLTVL |
| 726. | EpCAM_19180- | artificial | Aa | GYYMH |
| | G7_CC - | | | |
| | HCDR1 | | | |
| 727. | EpCAM_19180- | artificial | Aa | WINPNSGGTNYAQKFQG |
| | G7_CC - | | | |
| | HCDR2 | | | |
| 728. | EpCAM_19180- | artificial | Aa | TGALAGALKH |
| | G7_CC - | | | |
| | HCDR3 | | | |
| 729. | EpCAM_19180- | artificial | Aa | RSSQSLLHSNGYNYLD |
| | G7_CC - LCDR1 | | | |
| 730. | EpCAM_19180- | artificial | Aa | LGSNRAS |
| | G7_CC - LCDR2 | | | |
| 731. | EpCAM_19180- | artificial | Aa | MQALQTPFT |
| | G7_CC - LCDR3 | | | |
| 732. | EpCAM_19180- | artificial | Aa | QVQLVQSGAEVKKPGASVKVSCKASGYTFTG |
| | G7_CC - VH | | | YYMHWVRQAPGQCLEWMGWINPNSGGTNY |
| | | | | AQKFQGRITMTRDTSISTAYMELSRLRSDDTA |
| | | | | VYYCARTGALAGALKHWGQGTLVTVSS |
| 733. | EpCAM_19180- | artificial | Aa | EIVMTQSPLSLPVTPGEPASISCRSSQSLLHSN |
| | G7_CC - VL | | | GYNYLDWYLQKPGQSPQLLIYLGSNRASGVP |
| | | | | DRFSGSGSGTDFTLKISRVEAEDVGVYYCMQ |
| | | | | ALQTPFTFGCGTKVEIK |
| 734. | EpCAM_19182- | artificial | Aa | NYDMN |
| | H8_CC - | | | |
| | HCDR1 | | | |
| 735. | EpCAM_19182- | artificial | Aa | VISYDGSDKHYTDSVKG |
| | H8_CC - | | | |
| | HCDR2 | | | |
| 736. | EpCAM_19182- | artificial | Aa | RGATPVDY |
| | H8_CC - | | | |
| | HCDR3 | | | |
| 737. | EpCAM_19182- | artificial | Aa | TGTNSDVGGYNYVS |
| | H8_CC - LCDR1 | | | |
| 738. | EpCAM_19182- | artificial | Aa | DVSKRPS |
| | H8_CC - LCDR2 | | | |
| 739. | EpCAM_19182- | artificial | Aa | SSYISSSSLV |
| | H8_CC - LCDR3 | | | |
| 740. | EpCAM_19182- | artificial | Aa | QVQLVESGGGVVQPGRSLRLSCAASGFTFRN |
| | H8_CC - VH | | | YDMNWVRQAPGKCLEWVAVISYDGSDKHYT |
| | | | | DSVKGRFTISRDNSKNTLYLQMNSLRTEDTAV |
| | | | | YYCAKRGATPVDYWGQGTLVTVSS |
| 741. | EpCAM_19182- | artificial | Aa | QSALTQPASVSGSPGRSVTISCTGTNSDVGG |
| | H8_CC - VL | | | YNYVSWYQQHPGKAPKLMIYDVSKRPSGVSN |
| | | | | RFSGSKSGNTASLTISGLQAEDEADYYCSSYI |
| | | | | SSSSLVFGCGTKLTVL |
| 742. | EpCAM_19187- | artificial | Aa | NYDMN |
| | B6_N67Q_CC - | | | |
| | HCDR1 | | | |
| 743. | EpCAM_19187- | artificial | Aa | VISYDGSQKSYSDSVKG |
| | B6_N67Q_CC - | | | |
| | HCDR2 | | | |
| 744. | EpCAM_19187- | artificial | Aa | RGATPFDY |
| | B6_N67Q_CC - | | | |
| | HCDR3 | | | |
| 745. | EpCAM_19187- | artificial | Aa | GGNNIGSKSVH |
| | B6_N67Q_CC - | | | |
| | LCDR1 | | | |
| 746. | EpCAM_19187- | artificial | Aa | QDSKRPS |
| | B6_N67Q_CC - | | | |
| | LCDR2 | | | |
| 747. | EpCAM_19187- | artificial | Aa | QAWDSSTAV |
| | B6_N67Q_CC - | | | |
| | LCDR3 | | | |
| 748. | EpCAM_19187- | artificial | Aa | QVQLVESGGGVVQPGRSLRLSCAASGFTFRN |
| | B6_N67Q_CC - | | | YDMNWVRQAPGKCLEWVAVISYDGSQKSYS |
| | VH | | | DSVKGRFTISRDNSKNTLSLQMNSLRNEDTAV |
| | | | | YYCAKRGATPFDYWGQGTLVTVSS |
| 749. | EpCAM_19187- | artificial | Aa | SYELTQPPSVSVAPGQTARITCGGNNIGSKSV |
| | B6_N67Q_CC - | | | HWYQQKPGQSPVLVIYQDSKRPSGIPDRFSG |
| | VL | | | SNSGNTATLTISGTQAMDEADYYCQAWDSST |
| | | | | AVFGCGTKLTVL |
| 750. | MSLN_13203- | artificial | Aa | SNSAAWN |
| | C2_CC - | | | |
| | HCDR1 | | | |
| 751. | MSLN_13203- | artificial | Aa | RTYYRSKWYNDYAVSVKS |
| | C2_CC - | | | |
| | HCDR2 | | | |
| 752. | MSLN_13203- | artificial | Aa | AIFVVPAAMRFDY |
| | C2_CC - | | | |
| | HCDR3 | | | |
| 753. | MSLN_13203- | artificial | Aa | RSSQSLLHSNGYNYLD |
| | C2_CC - LCDR1 | | | |
| 754. | MSLN_13203- | artificial | Aa | LGSNRAS |
| | C2_CC - LCDR2 | | | |
| 755. | MSLN_13203- | artificial | Aa | MQALQTPT |
| | C2_CC - LCDR3 | | | |
| 756. | MSLN_13203- | artificial | Aa | QVQLQQSGPGLVKPSQTLSLTCAISGDSVSS |
| | C2_CC - VH | | | NSAAWNWIRQSPSRCLEWLGRTYYRSKWYN |
| | | | | DYAVSVKSRITINPDISKNQFSLQLNSVTPEDT |
| | | | | AVYYCARAIFVVPAAMRFDYWGQGTLVTVSS |
| 757. | MSLN_13203- | artificial | Aa | EIVMTQSPLSLPVTPGEPASISCRSSQSLLHSN |
| | C2_CC - VL | | | GYNYLDWYLQKPGQSPQLLIYLGSNRASGVP |
| | | | | DRFSGSGSGTDFTLKISRVEAEDVGVYYCMQ |
| | | | | ALQTPTFGCGTKVDIK |
| 758. | MSLN_13203- | artificial | Aa | SNYMS |
| | F11_CC - | | | |
| | HCDR1 | | | |
| 759. | MSLN_13203- | artificial | Aa | VIYSSGNTYYADSVKG |
| | F11_CC - | | | |
| | HCDR2 | | | |
| 760. | MSLN_13203- | artificial | Aa | GSYYAFDI |
| | F11_CC - | | | |
| | HCDR3 | | | |
| 761. | MSLN_13203- | artificial | Aa | GLSSGSVSTTYYPS |
| | F11_CC - | | | |
| | LCDR1 | | | |
| 762. | MSLN_13203- | artificial | Aa | STNTRSS |
| | F11_CC - | | | |
| | LCDR2 | | | |
| 763. | MSLN_13203- | artificial | Aa | VLYMGSGIWV |
| | F11_CC - | | | |
| | LCDR3 | | | |
| 764. | MSLN_13203- | artificial | Aa | EVQLVESGGGLIQPGGSLRLSCAVSGFTVSS |
| | F11_CC - VH | | | NYMSWVRQAPGKCLEWVSVIYSSGNTYYADS |
| | | | | VKGRFTISRDNSKNTLYLQMNSLRAEDTAVYY |
| | | | | CASGSYYAFDIWGQGTMVTVSS |
| 765. | MSLN_13203- | artificial | Aa | QTVVTQEPSLTVSPGGTVTLTCGLSSGSVSTT |
| | F11_CC - VL | | | YYPSWYQQTPGQAPRTLIYSTNTRSSGVPDR |
| | | | | FSGSILGNKAALTITGAQADDESDYYCVLYMG |
| | | | | SGIWVFGCGTKLTVL |
| 766. | MSLN_13204- | artificial | Aa | NAWMS |
| | A9_CC - HCDR1 | | | |
| 767. | MSLN_13204- | artificial | Aa | RIKTKTDGGTTDYAAPVKG |
| | A9_CC - HCDR2 | | | |
| 768. | MSLN_13204- | artificial | Aa | DFRIMGATWFDP |
| | A9_CC - HCDR3 | | | |
| 769. | MSLN_13204- | artificial | Aa | SGDKLGDKYAS |
| | A9_CC - LCDR1 | | | |
| 770. | MSLN_13204- | artificial | Aa | QHSRRPS |
| | A9_CC - LCDR2 | | | |
| 771. | MSLN_13204- | artificial | Aa | QAWDSSTVV |
| | A9_CC - LCDR3 | | | |
| 772. | MSLN_13204- | artificial | Aa | EVQLVESGGGLVKPGGSLRLSCAASGFTFSN |
| | A9_CC - VH | | | AWMSWVRQAPGKCLEWVGRIKTKTDGGTTD |
| | | | | YAAPVKGRFTISRDDSKNTLYLQMNSLKTEDT |
| | | | | AVYYCTTDFRIMGATWFDPWGQGTLVTVSS |
| 773. | MSLN_13204- | artificial | Aa | SYELTQPPSVSVSPGQTASITCSGDKLGDKYA |
| | A9_CC - VL | | | SWYQQKPGQSPVLVIYQHSRRPSGIPERFSG |
| | | | | SNSGNTATLTISGTQAMDEADYYCQAWDSST |
| | | | | VVFGCGTKLTVL |
| 774. | MSLN_13204- | artificial | Aa | SYSMN |
| | D11_CC - | | | |
| | HCDR1 | | | |
| 775. | MSLN_13204- | artificial | Aa | SISSRSSYIHYADSVKG |
| | D11_CC - | | | |
| | HCDR2 | | | |
| 776. | MSLN_13204- | artificial | Aa | VQRAGLDY |
| | D11_CC - | | | |
| | HCDR3 | | | |
| 777. | MSLN_13204- | artificial | Aa | TGSSSDVGNYNLVS |
| | D11_CC - | | | |
| | LCDR1 | | | |
| 778. | MSLN_13204- | artificial | Aa | EVSNRPS |
| | D11_CC - | | | |
| | LCDR2 | | | |
| 779. | MSLN_13204- | artificial | Aa | SSYTSSSTWV |
| | D11_CC - | | | |
| | LCDR3 | | | |
| 780. | MSLN_13204- | artificial | Aa | EVQLVESGGGLVKPGGSLRLSCAASGFTFSS |
| | D11_CC - VH | | | YSMNWVRQAPGKCLEWVSSISSRSSYIHYAD |
| | | | | SVKGRFTISRDNAKNSLNLQMNSLRAEDTAVY |
| | | | | YCARVQRAGLDYWGQGTLVTVSS |
| 781. | MSLN_13204- | artificial | Aa | QSALTQPASVSGSPGQSITISCTGSSSDVGNY |
| | D11_CC - VL | | | NLVSWYQQHPGKAPKLMISEVSNRPSGVSDR |
| | | | | FSGSKSGNTASLTISGLQAEDEADYYCSSYTS |
| | | | | SSTWVFGCGTKLTVL |
| 782. | MSLN_13204- | artificial | Aa | SSSYYWG |
| | F11_CC - | | | |
| | HCDR1 | | | |
| 783. | MSLN_13204- | artificial | Aa | SIYYSGSTNYNPSLKS |
| | F11_CC - | | | |
| | HCDR2 | | | |
| 784. | MSLN_13204- | artificial | Aa | PSNYDAFDI |
| | F11_CC - | | | |
| | HCDR3 | | | |
| 785. | MSLN_13204- | artificial | Aa | TGSSSNIGAGYDVH |
| | F11_CC - | | | |
| | LCDR1 | | | |
| 786. | MSLN_13204- | artificial | Aa | GNSNRPS |
| | F11_CC - | | | |
| | LCDR2 | | | |
| 787. | MSLN_13204- | artificial | Aa | QSYDSSLGGWV |
| | F11_CC - | | | |
| | LCDR3 | | | |
| 788. | MSLN_13204- | artificial | Aa | QVQLQESGPGLVKPSETLSLTCTVSGGSLSS |
| | F11_CC - VH | | | SSYYWGWIRQPPGKCLEWIGSIYYSGSTNYN |
| | | | | PSLKSRVTISADTSKNQFSLKLSSVTAADTAVY |
| | | | | YCARPSNYDAFDIWGQGTMVTVSS |
| 789. | MSLN_13204- | artificial | Aa | QSVLTQPPSVSGAPGQRVTISCTGSSSNIGAG |
| | F11_CC - VL | | | YDVHWYQQLPGTAPKLLIYGNSNRPSGVPDR |
| | | | | FSGSKSGTSASLAITGLQAEDEADYYCQSYDS |
| | | | | SLGGWVFGCGTKLTVL |
| 790. | MSLN_13204- | artificial | Aa | SGGFFWS |
| | H6_CC - | | | |
| | HCDR1 | | | |
| 791. | MSLN_13204- | artificial | Aa | YIYYSGSTYYNPSLRS |
| | H6_CC - | | | |
| | HCDR2 | | | |
| 792. | MSLN_13204- | artificial | Aa | DPGSYRVWFDP |
| | H6_CC - | | | |
| | HCDR3 | | | |
| 793. | MSLN_13204- | artificial | Aa | RASQNIKNYLN |
| | H6_CC - LCDR1 | | | |
| 794. | MSLN_13204- | artificial | Aa | DASSLQS |
| | H6_CC - LCDR2 | | | |
| 795. | MSLN_13204- | artificial | Aa | QQSYSTPFT |
| | H6_CC - LCDR3 | | | |
| 796. | MSLN_13204- | artificial | Aa | QVQLQESGPGLVKPSQTLSLTCTVSGGSISSG |
| | H6_CC - VH | | | GFFWSWIRQHPGKCLEWIGYIYYSGSTYYNP |
| | | | | SLRSRVTISVDTSKNQFSLKLSSVTAADTAVYY |
| | | | | CARDPGSYRVWFDPWGQGTLVTVSS |
| 797. | MSLN_13204- | artificial | Aa | EIQMTQSPSSLSASVGDRVTITCRASQNIKNYL |
| | H6_CC - VL | | | NWYQQKPGRAPKLLIYDASSLQSGDPSRFSG |
| | | | | SGSGTDFTLTISSLQPEDFATYYCQQSYSTPF |
| | | | | TFGCGTKVEIK |
| 798. | MSLN_13213- | artificial | Aa | DHYMS |
| | A9_CC - HCDR1 | | | |
| 799. | MSLN_13213- | artificial | Aa | YISNSGSIIYYVDSVKG |
| | A9_CC - HCDR2 | | | |
| 800. | MSLN_13213- | artificial | Aa | DVRTAFDY |
| | A9_CC - HCDR3 | | | |
| 801. | MSLN_13213- | artificial | Aa | RASQSIGSWLA |
| | A9_CC - LCDR1 | | | |
| 802. | MSLN_13213- | artificial | Aa | AASSLQS |
| | A9_CC - LCDR2 | | | |
| 803. | MSLN_13213- | artificial | Aa | QQANSFPPT |
| | A9_CC - LCDR3 | | | |
| 804. | MSLN_13213- | artificial | Aa | QVQLVESGGGLVKPGGSLRLSCAASGFTFSD |
| | A9_CC - VH | | | HYMSWIRQAPGKCLEWISYISNSGSIIYYVDSV |
| | | | | KGRFTISRDNAKNSLYLQMNSLRAEDTAVYYC |
| | | | | ARDVRTAFDYWGQGTLVTVSS |
| 805. | MSLN_13213- | artificial | Aa | EIQMTQSPSSVSASVGDRVTITCRASQSIGSW |
| | A9_CC - VL | | | LAWYQQKPGKAPNLLIYAASSLQSGVPSRFS |
| | | | | GSGSGTDFTLTISSLQPEDFATYYCQQANSFP |
| | | | | PTFGCGTKVEIK |
| 806. | MSLN_13215- | artificial | Aa | SSSYFWG |
| | B12_CC - | | | |
| | HCDR1 | | | |
| 807. | MSLN_13215- | artificial | Aa | NIYYSGSSNYNPSLKS |
| | B12_CC - | | | |
| | HCDR2 | | | |
| 808. | MSLN_13215- | artificial | Aa | LPRGDRDAFDI |
| | B12_CC - | | | |
| | HCDR3 | | | |
| 809. | MSLN_13215- | artificial | Aa | RASQGISNYLA |
| | B12_CC - | | | |
| | LCDR1 | | | |
| 810. | MSLN_13215- | artificial | Aa | AASTLQS |
| | B12 CC - | | | |
| | LCDR2 | | | |
| 811. | MSLN_13215- | artificial | Aa | QQSYSTPFT |
| | B12_CC - | | | |
| | LCDR3 | | | |
| 812. | MSLN_13215- | artificial | Aa | QVQLQESGPGLVKPSETLSLTCTVSGGSISSS |
| | B12_CC - VH | | | SYFWGWIRQPPGKCLEWIGNIYYSGSSNYNP |
| | | | | SLKSRVTISVDTSKNQFSLKLSSVTAADTAVYY |
| | | | | CARLPRGDRDAFDIWGQGTMVTVSS |
| 813. | MSLN_13215- | artificial | Aa | EIVMTQSPSSLSASVGDRVTITCRASQGISNYL |
| | B12_CC - VL | | | AWYQQKPGKVPKLLIYAASTLQSGVPSRFSG |
| | | | | SGSGTDFTLTISSLQPEDFATYYCQQSYSTPF |
| | | | | TFGCGTKVEIK |
| 814. | MSLN_13215- | artificial | Aa | SSSYFWG |
| | B12_LC_V3Q_C | | | |
| | C - HCDR1 | | | |
| 815. | MSLN_13215- | artificial | Aa | NIYYSGSSNYNPSLKS |
| | B12_LC_V3Q_C | | | |
| | C - HCDR2 | | | |
| 816. | MSLN_13215- | artificial | Aa | LPRGDRDAFDI |
| | B12_LC_V3Q_C | | | |
| | C - HCDR3 | | | |
| 817. | MSLN_13215- | artificial | Aa | RASQGISNYLA |
| | B12_LC_V3Q_C | | | |
| | C - LCDR1 | | | |
| 818. | MSLN_13215- | artificial | Aa | AASTLQS |
| | B12_LC_V3Q_C | | | |
| | C - LCDR2 | | | |
| 819. | MSLN_13215- | artificial | Aa | QQSYSTPFT |
| | B12_LC_V3Q_C | | | |
| | C - LCDR3 | | | |
| 820. | MSLN_13215- | artificial | Aa | QVQLQESGPGLVKPSETLSLTCTVSGGSISSS |
| | B12_LC_V3Q_C | | | SYFWGWIRQPPGKCLEWIGNIYYSGSSNYNP |
| | C - VH | | | SLKSRVTISVDTSKNQFSLKLSSVTAADTAVYY |
| | | | | CARLPRGDRDAFDIWGQGTMVTVSS |
| 821. | MSLN_13215- | artificial | Aa | EIQMTQSPSSLSASVGDRVTITCRASQGISNYL |
| | B12_LC_V3Q_C | | | AWYQQKPGKVPKLLIYAASTLQSGVPSRFSG |
| | C - VL | | | SGSGTDFTLTISSLQPEDFATYYCQQSYSTPF |
| | | | | TFGCGTKVEIK |
| 822. | MSLN_13216- | artificial | Aa | SGGHFWS |
| | B12_CC - | | | |
| | HCDR1 | | | |
| 823. | MSLN_13216- | artificial | Aa | YIYYSGSTYSTPSLTS |
| | B12_CC - | | | |
| | HCDR2 | | | |
| 824. | MSLN_13216- | artificial | Aa | EGQSGSFDI |
| | B12_CC - | | | |
| | HCDR3 | | | |
| 825. | MSLN_13216- | artificial | Aa | TGTSSDVGGSDYVS |
| | B12_CC - | | | |
| | LCDR1 | | | |
| 826. | MSLN_13216- | artificial | Aa | EVSNRPS |
| | B12_CC - | | | |
| | LCDR2 | | | |
| 827. | MSLN_13216- | artificial | Aa | SSYTTTGTLV |
| | B12_CC - | | | |
| | LCDR3 | | | |
| 828. | MSLN_13216- | artificial | Aa | QVQLQESGPGLVKPSQTLSLTCTVSGGSISSG |
| | B12_CC - VH | | | GHFWSWIRQHPGKCLEWIGYIYYSGSTYSTP |
| | | | | SLTSRVTMSRDTSKNQFSLKLSSVTAADTAVY |
| | | | | YCAREGQSGSFDIWGQGTMVTVSS |
| 829. | MSLN_13216- | artificial | Aa | QSALTQPASVSGSPGQSITISCTGTSSDVGGS |
| | B12_CC - VL | | | DYVSWYRQHPGKAPKLIIYEVSNRPSGVSNRF |
| | | | | SGSKSGNTASLTISGLQAEDEADYYCSSYTTT |
| | | | | GTLVFGCGTKLTVL |
| 830. | MSLN_13216- | artificial | Aa | SYGMH |
| | B4_CC - HCDR1 | | | |
| 831. | MSLN_13216- | artificial | Aa | VIWKDGNNKYYADSVKG |
| | B4_CC - HCDR2 | | | |
| 832. | MSLN_13216- | artificial | Aa | GLNYYYGMDV |
| | B4_CC - HCDR3 | | | |
| 833. | MSLN_13216- | artificial | Aa | TRSNGGIANNYVQ |
| | B4_CC - LCDR1 | | | |
| 834. | MSLN_13216- | artificial | Aa | ENNQRPS |
| | B4_CC - LCDR2 | | | |
| 835. | MSLN_13216- | artificial | Aa | QSYDGSHHVV |
| | B4_CC - LCDR3 | | | |
| 836. | MSLN_13216- | artificial | Aa | QVQLVESGGGVVQPGRSLRLSCAASGFTFSS |
| | B4_CC - VH | | | YGMHWVRQAPGKCLEWVAVIWKDGNNKYYA |
| | | | | DSVKGRFTISRDNSKNTLYLQMNSLRAEDTAV |
| | | | | YYCARGLNYYYGMDVWGQGTTVTVSS |
| 837. | MSLN_13216- | artificial | Aa | NFMLTQPHSVSESPGKTATISCTRSNGGIANN |
| | B4_CC - VL | | | YVQWYQQRPGSSPTIVIYENNQRPSGVPDRF |
| | | | | SGSIDSSSNSASLTISGLKTEDEADYYCQSYD |
| | | | | GSHHVVFGCGTKLTVL |
| 838. | MSLN_13216- | artificial | Aa | GYYIH |
| | C1_CC - | | | |
| | HCDR1 | | | |
| 839. | MSLN_13216- | artificial | Aa | WINPKSGGTHYAQKFQG |
| | C1_CC - | | | |
| | HCDR2 | | | |
| 840. | MSLN_13216- | artificial | Aa | AEARLAARQEYYYFYGMDV |
| | C1_CC - | | | |
| | HCDR3 | | | |
| 841. | MSLN_13216- | artificial | Aa | SGDKLGDKYAS |
| | C1_CC - LCDR1 | | | |
| 842. | MSLN_13216- | artificial | Aa | QDSKRPS |
| | C1_CC - LCDR2 | | | |
| 843. | MSLN_13216- | artificial | Aa | QAWDSSTVV |
| | C1_CC - LCDR3 | | | |
| 844. | MSLN_13216- | artificial | Aa | QVQLVQSGAEVKKPGASVKVSCKASGYTFTG |
| | C1_CC - VH | | | YYIHWVRQAPGQCLEWMGWINPKSGGTHYA |
| | | | | QKFQGRVTMTRDTSISTAYMELSRLRSDDTAV |
| | | | | YYCARAEARLAARQEYYYFYGMDVWGQGTT |
| | | | | VTVSS |
| 845. | MSLN_13216- | artificial | Aa | SYELTQPASVSVSPGQTASITCSGDKLGDKYA |
| | C1_CC - VL | | | SWYQQKPGQSPVLVIYQDSKRPSGIPERFSG |
| | | | | SNSGNTATLTISGTQAMDEADYYCQAWDSST |
| | | | | VVFGCGTKLTVL |
| 846. | MSLN_13229- | artificial | Aa | SGAYFWS |
| | C9_CC - | | | |
| | HCDR1 | | | |
| 847. | MSLN_13229- | artificial | Aa | YIYYSGSTYTNPSLRD |
| | C9_CC - | | | |
| | HCDR2 | | | |
| 848. | MSLN_13229- | artificial | Aa | EGAGYVFDI |
| | C9_CC - | | | |
| | HCDR3 | | | |
| 849. | MSLN_13229- | artificial | Aa | TGTSSDVGGYNYVS |
| | C9_CC - LCDR1 | | | |
| 850. | MSLN_13229- | artificial | Aa | EVSNRPS |
| | C9_CC - LCDR2 | | | |
| 851. | MSLN_13229- | artificial | Aa | QVWDSSSDHVV |
| | C9_CC - LCDR3 | | | |
| 852. | MSLN_13229- | artificial | Aa | QVQLQESGPGLVKPSQTLSLTCTVSGGSISSG |
| | C9_CC - VH | | | AYFWSWIRQHPGKCLEWIGYIYYSGSTYTNPS |
| | | | | LRDRLKISVDTSKNQFSLKLSSVTAADTAMYY |
| | | | | CAREGAGYVFDIWGQGTMVTVSS |
| 853. | MSLN_13229- | artificial | Aa | QSALTQPASVSGSPGQSITISCTGTSSDVGGY |
| | C9_CC - VL | | | NYVSWYQQHPGKAPKLMIYEVSNRPSGVSNR |
| | | | | FSGSKSGNTASLTISGLQAGDEADYFCQVWD |
| | | | | SSSDHVVFGCGTKLTVL |
| 854. | MSLN_13238- | artificial | Aa | SGGYYWN |
| | G11_CC - | | | |
| | HCDR1 | | | |
| 855. | MSLN_13238- | artificial | Aa | YIFYSGITYSNPSLKS |
| | G11_CC - | | | |
| | HCDR2 | | | |
| 856. | MSLN_13238- | artificial | Aa | GLVRGAPDAFDI |
| | G11_CC - | | | |
| | HCDR3 | | | |
| 857. | MSLN_13238- | artificial | Aa | QASQDISNYLN |
| | G11_CC - | | | |
| | LCDR1 | | | |
| 858. | MSLN_13238- | artificial | Aa | AASSLQG |
| | G11_CC - | | | |
| | LCDR2 | | | |
| 859. | MSLN_13238- | artificial | Aa | QQSYSTPFT |
| | G11_CC - | | | |
| | LCDR3 | | | |
| 860. | MSLN_13238- | artificial | Aa | QVQLQESGPGLVKPSQTLSLTCTVSGGSISSG |
| | G11_CC - VH | | | GYYWNWIRQHPGQCLEWIGYIFYSGITYSNPS |
| | | | | LKSLFTISLDTSKNQFSLKLSSVTAADTAVYYC |
| | | | | ARGLVRGAPDAFDIWGQGTMVTVSS |
| 861. | MSLN_13238- | artificial | Aa | EIQMTQSPSSLSASVGDRVTITCQASQDISNYL |
| | G11_CC - VL | | | NWYQLKPGKAPKLLIQAASSLQGGVPSRFSG |
| | | | | SGSGTDFTLTISSLQPEDFATYYCQQSYSTPF |
| | | | | TFGCGTKVEIK |
| 862. | MSLN_13239- | artificial | Aa | SYYWS |
| | D5_CC - | | | |
| | HCDR1 | | | |
| 863. | MSLN_13239- | artificial | Aa | RIYYNGNTYYNPSLKS |
| | D5_CC - | | | |
| | HCDR2 | | | |
| 864. | MSLN_13239- | artificial | Aa | PKLGIDAFDI |
| | D5_CC - | | | |
| | HCDR3 | | | |
| 865. | MSLN_13239- | artificial | Aa | TGSSSNIGAGYDVH |
| | D5_CC - LCDR1 | | | |
| 866. | MSLN_13239- | artificial | Aa | GNSNRPS |
| | D5_CC - LCDR2 | | | |
| 867. | MSLN_13239- | artificial | Aa | QSHDSSLSGSV |
| | D5_CC - LCDR3 | | | |
| 868. | MSLN_13239- | artificial | Aa | QVQLQESGPGLVKPSETLSLTCTVSGGSISSY |
| | D5_CC - VH | | | YWSWIRQPPGKCLEWIGRIYYNGNTYYNPSL |
| | | | | KSRVTISGDTSKNQFSLKLSSVTAADTAVYYC |
| | | | | ARPKLGIDAFDIWGQGTMVTVSS |
| 869. | MSLN_13239- | artificial | Aa | QSVLTQPPSVSGAPGQRVTISCTGSSSNIGAG |
| | D5_CC - VL | | | YDVHWYQKLPGTAPKLLIYGNSNRPSGVPDR |
| | | | | FSGSKSGTSASLAITGLQAEDEADYYCQSHDS |
| | | | | SLSGSVFGCGTKLTVL |
| 870. | MSLN_13254- | artificial | Aa | SGGYFWS |
| | B10_CC - | | | |
| | HCDR1 | | | |
| 871. | MSLN_13254- | artificial | Aa | YIYYSGSTYTNPSLRD |
| | B10_CC - | | | |
| | HCDR2 | | | |
| 872. | MSLN_13254- | artificial | Aa | EGAGYAFDI |
| | B10_CC - | | | |
| | HCDR3 | | | |
| 873. | MSLN_13254- | artificial | Aa | TGTSSDVGGYNYVS |
| | B10_CC - | | | |
| | LCDR1 | | | |
| 874. | MSLN_13254- | artificial | Aa | EVSNRPS |
| | B10_CC - | | | |
| | LCDR2 | | | |
| 875. | MSLN_13254- | artificial | Aa | SSYTSSSTLV |
| | B10_CC - | | | |
| | LCDR3 | | | |
| 876. | MSLN_13254- | artificial | Aa | QVQLQESGGGLVKPSETLSLTCTVSGGSISSG |
| | B10_CC - VH | | | GYFWSWIRQHPGKCLEWIGYIYYSGSTYTNP |
| | | | | SLRDRLKISVDTSKNQFSLKLSSVTAADTAMY |
| | | | | YCAREGAGYAFDIWGQGTMVTVSS |
| 877. | MSLN_13254- | artificial | Aa | QSALTQPASVSGSPGQSITISCTGTSSDVGGY |
| | B10_CC - VL | | | NYVSWYQQHPGKAPKLMIYEVSNRPSGVSNR |
| | | | | FSGSKSGNTASLTISGLQAEDEADYYCSSYTS |
| | | | | SSTLVFGCGTKLTVL |
| 878. | MSLN_13256- | artificial | Aa | SYGMH |
| | H4_CC - | | | |
| | HCDR1 | | | |
| 879. | MSLN_13256- | artificial | Aa | VISYDGSNKYYADSVKG |
| | H4_CC - | | | |
| | HCDR2 | | | |
| 880. | MSLN_13256- | artificial | Aa | EGAYFGSGSYYPLYYYYAMDV |
| | H4_CC - | | | |
| | HCDR3 | | | |
| 881. | MSLN_13256- | artificial | Aa | RASQSVSSSYLA |
| | H4_CC - LCDR1 | | | |
| 882. | MSLN_13256- | artificial | Aa | GASIRAT |
| | H4_CC - LCDR2 | | | |
| 883. | MSLN_13256- | artificial | Aa | QQYGSSLFT |
| | H4_CC - LCDR3 | | | |
| 884. | MSLN_13256- | artificial | Aa | QVQLVESGGGVVQPGRSLRLSCAASGFTFSS |
| | H4_CC - VH | | | YGMHWVRQAPGKCLEWVAVISYDGSNKYYA |
| | | | | DSVKGRFTISRDNSKNTLYLQMNSLRAEDTAV |
| | | | | YYCAREGAYFGSGSYYPLYYYYAMDVWGQG |
| | | | | TTVTVSS |
| 885. | MSLN_13256- | artificial | Aa | EIVMTQSPGTLSLSPGERATLSCRASQSVSSS |
| | H4_CC - VL | | | YLAWYQQKPGQAPRLLIYGASIRATGIPDRFS |
| | | | | GSGSGTDFTLTISRLEPEDFAVYYCQQYGSSL |
| | | | | FTFGCGTRLEIK |
| 886. | MSLN_13266- | artificial | Aa | DHYMS |
| | C1_CC - | | | |
| | HCDR1 | | | |
| 887. | MSLN_13266- | artificial | Aa | YISSSGSTIYYVDSVKG |
| | C1_CC - | | | |
| | HCDR2 | | | |
| 888. | MSLN_13266- | artificial | Aa | DVRTAFDY |
| | C1_CC - | | | |
| | HCDR3 | | | |
| 889. | MSLN_13266- | artificial | Aa | RASQGISSWLA |
| | C1_CC - LCDR1 | | | |
| 890. | MSLN_13266- | artificial | Aa | AASGLQS |
| | C1_CC - LCDR2 | | | |
| 891. | MSLN_13266- | artificial | Aa | QQANSFPPT |
| | C1_CC - LCDR3 | | | |
| 892. | MSLN_13266- | artificial | Aa | QVQLVESGGGLVKPGGSLRLSCAASGFTFSD |
| | C1_CC - VH | | | HYMSWIRQTPGKCLEWVSYISSSGSTIYYVDS |
| | | | | VKGRFTISRDNAKNSLYLQMNSLRAEDTAVYY |
| | | | | CARDVRTAFDYWGQGTLVTVSS |
| 893. | MSLN_13266- | artificial | Aa | EIQMTQSPSSVSASVGDRVTITCRASQGISSW |
| | C1_CC - VL | | | LAWYQQKPGKAPKLLIYAASGLQSGVPSRFS |
| | | | | GSGSGTDFTLTISSLQPEDFATYYCQQANSFP |
| | | | | PTFGCGTKVEIK |
| 894. | MSLN_13268- | artificial | Aa | SYTMS |
| | A4_CC - HCDR1 | | | |
| 895. | MSLN_13268- | artificial | Aa | AISGSGGNTYYADSVKG |
| | A4_CC - HCDR2 | | | |
| 896. | MSLN_13268- | artificial | Aa | VGRAALDY |
| | A4_CC - HCDR3 | | | |
| 897. | MSLN_13268- | artificial | Aa | TGTSSDVGSYNLVS |
| | A4_CC - LCDR1 | | | |
| 898. | MSLN_13268- | artificial | Aa | EVSKRPS |
| | A4_CC - LCDR2 | | | |
| 899. | MSLN_13268- | artificial | Aa | SSYTSSSTVV |
| | A4_CC - LCDR3 | | | |
| 900. | MSLN_13268- | artificial | Aa | EVQLLESGGGLVQPGGSPRLSCAVSGFTFSS |
| | A4_CC - VH | | | YTMSWVRQAPGKCLEWVSAISGSGGNTYYA |
| | | | | DSVKGRSTISRDNSRNTLYLQMNSLRAEDTAV |
| | | | | YYCAKVGRAALDYWGQGTLVTVSS |
| 901. | MSLN_13268- | artificial | Aa | QSALTQPPSVSGSPGQSITISCTGTSSDVGSY |
| | A4_CC - VL | | | NLVSWYQQHPGKAPKLMIYEVSKRPSGVSNR |
| | | | | FSGSKSGNTASLTISGLQAEDEADYYCSSYTS |
| | | | | SSTVVFGCGTKLTVL |
| 902. | MSLN_13269- | artificial | Aa | SYAMS |
| | A6_CC - HCDR1 | | | |
| 903. | MSLN_13269- | artificial | Aa | AISGSGGSTYYADSVKG |
| | A6_CC - HCDR2 | | | |
| 904. | MSLN_13269- | artificial | Aa | EGYYDSSGYPLYYYFGMDV |
| | A6_CC - HCDR3 | | | |
| 905. | MSLN_13269- | artificial | Aa | RASQSVSSSYLA |
| | A6_CC - LCDR1 | | | |
| 906. | MSLN_13269- | artificial | Aa | GASSRAT |
| | A6_CC - LCDR2 | | | |
| 907. | MSLN_13269- | artificial | Aa | QRYGSSPIFT |
| | A6_CC - LCDR3 | | | |
| 908. | MSLN_13269- | artificial | Aa | EVQLLESGGGLVQPGGSLRLSCAASGFTFSS |
| | A6_CC - VH | | | YAMSWVRQAPGKCLEWVSAISGSGGSTYYA |
| | | | | DSVKGRFTISRDNSKNTLYLQMNSLRAEDTAV |
| | | | | YYCAREGYYDSSGYPLYYYFGMDVWGQGTT |
| | | | | VTVSS |
| 909. | MSLN_13269- | artificial | Aa | EIVLTQSPGTLSLSPGERATLSCRASQSVSSS |
| | A6_CC - VL | | | YLAWYQQKPGQAPRLLIYGASSRATGIPDRFS |
| | | | | GSGSGTDFTLTISRLEPEDFAVYYCQRYGSSP |
| | | | | IFTFGCGTKVEIK |
| 910. | MSLN_13270- | artificial | Aa | NAWMS |
| | A3_CC - HCDR1 | | | |
| 911. | MSLN_13270- | artificial | Aa | RIKTKTDGGTTDYAAPVKG |
| | A3_CC - HCDR2 | | | |
| 912. | MSLN_13270- | artificial | Aa | DFRIMGATWFDP |
| | A3_CC - HCDR3 | | | |
| 913. | MSLN_13270- | artificial | Aa | SGSSSNIGSYSVN |
| | A3_CC - LCDR1 | | | |
| 914. | MSLN_13270- | artificial | Aa | SNNQRPS |
| | A3_CC - LCDR2 | | | |
| 915. | MSLN_13270- | artificial | Aa | AAWDDSLSGRGVA |
| | A3_CC - LCDR3 | | | |
| 916. | MSLN_13270- | artificial | Aa | EVQLVESGGGLVKPGGSLRLSCAASGFTFSN |
| | A3_CC - VH | | | AWMSWVRQAPGKCLEWVGRIKTKTDGGTTD |
| | | | | YAAPVKGRFTISRDDSKNTLYLQMNSLKTEDT |
| | | | | AVYYCTTDFRIMGATWFDPWGQGTLVTVSS |
| 917. | MSLN_13270- | artificial | Aa | QSVLTQPSSASGTPGQRVTISCSGSSSNIGSY |
| | A3_CC - VL | | | SVNWYQQLPGTAPKLLIYSNNQRPSGVPDRF |
| | | | | SGSKSGTSASLAISGLRSEDEADYYCAAWDD |
| | | | | SLSGRGVAFGCGTKLTVL |
| 918. | MSLN_13317- | artificial | Aa | DYYMS |
| | C7_CC - | | | |
| | HCDR1 | | | |
| 919. | MSLN_13317- | artificial | Aa | YISSSGSMIYYIDSVKG |
| | C7_CC - | | | |
| | HCDR2 | | | |
| 920. | MSLN_13317- | artificial | Aa | DLGPSFDY |
| | C7_CC - | | | |
| | HCDR3 | | | |
| 921. | MSLN_13317- | artificial | Aa | RASQGIGSWLA |
| | C7_CC - LCDR1 | | | |
| 922. | MSLN_13317- | artificial | Aa | GASGLQS |
| | C7_CC - LCDR2 | | | |
| 923. | MSLN_13317- | artificial | Aa | QQANSFPRT |
| | C7_CC - LCDR3 | | | |
| 924. | MSLN_13317- | artificial | Aa | QVQLVESGGGLVKPGGSLRLSCAASGFTFSD |
| | C7_CC - VH | | | YYMSWIRQAPGKCLEWISYISSSGSMIYYIDSV |
| | | | | KGRFTISRDNAKNSLYLQMNSLRAEDTAVYYC |
| | | | | ARDLGPSFDYWGQGSLVTVSS |
| 925. | MSLN_13317- | artificial | Aa | EIQMTQSPSSVAATVGDRVTITCRASQGIGSW |
| | C7_CC - VL | | | LAWYQQKPGKAPKLLIYGASGLQSGVPSRFS |
| | | | | GSGSGTDFTLTISSLQPEDFATYYCQQANSFP |
| | | | | RTFGCGTKVEIK |
| 926. | MSLN_13317- | artificial | Aa | DHYMS |
| | F9_CC - HCDR1 | | | |
| 927. | MSLN_3317- | artificial | Aa | YISNSGSTIYYADSVKG |
| | F9_CC - HCDR2 | | | |
| 928. | MSLN_13317- | artificial | Aa | DQRNAFDI |
| | F9_CC - HCDR3 | | | |
| 929. | MSLN_13317- | artificial | Aa | RASQGIGSWLA |
| | F9_CC - LCDR1 | | | |
| 930. | MSLN_13317- | artificial | Aa | AASGLQS |
| | F9_CC - LCDR2 | | | |
| 931. | MSLN_13317- | artificial | Aa | QQSYSNPLT |
| | F9_CC - LCDR3 | | | |
| 932. | MSLN_13317- | artificial | Aa | QVQLVESGGGLVKPGGSLRLSCAASGFTFSD |
| | F9_CC - VH | | | HYMSWIRQAPGKCLEWISYISNSGSTIYYADS |
| | | | | VKGRFTISRDNAKNSLYLQMNSLRAEDTAVYY |
| | | | | CARDQRNAFDIWGQGTMVTVSS |
| 933. | MSLN_13317- | artificial | Aa | AIQMTQSPSSLSASVGDRVTITCRASQGIGSW |
| | F9_CC - VL | | | LAWYQQKPGKAPKLLIYAASGLQSGVPSRFS |
| | | | | GSGSGTDFTLTISSLQPEDFATYYCQQSYSNP |
| | | | | LTFGCGTKVEIK |
| 934. | MSLN_13318- | artificial | Aa | SSSYYWG |
| | B9_CC - HCDR1 | | | |
| 935. | MSLN_13318- | artificial | Aa | SIYYSGTTRYNPSLRS |
| | B9_CC - HCDR2 | | | |
| 936. | MSLN_13318- | artificial | Aa | PGAGHDGFDI |
| | B9_CC - HCDR3 | | | |
| 937. | MSLN_13318- | artificial | Aa | SGSSSNIGSNYVY |
| | B9_CC - LCDR1 | | | |
| 938. | MSLN_13318- | artificial | Aa | DNNKRPS |
| | B9_CC - LCDR2 | | | |
| 939. | MSLN_13318- | artificial | Aa | AAWDDSLSGWV |
| | B9_CC - LCDR3 | | | |
| 940. | MSLN_13318- | artificial | Aa | QVQLQESGPGLLKPSETLSLTCTVSGGSISSS |
| | B9_CC - VH | | | SYYWGWIRQPPGKCLEWIGSIYYSGTTRYNP |
| | | | | SLRSRVTTSLDASKNRLSLQLSSVTAADTAVY |
| | | | | YCARPGAGHDGFDIWGQGTMVTVSS |
| 941. | MSLN_13318- | artificial | Aa | QSVLTQPPSASGTPGQRVTISCSGSSSNIGSN |
| | B9_CC - VL | | | YVYWYQQLPGTAPKLLIYDNNKRPSGIPDRFS |
| | | | | GSKSGTSASLAISGLRSEDEADYYCAAWDDS |
| | | | | LSGWVFGCGTKLTVL |
| 942. | MSLN_13319- | artificial | Aa | SYYWS |
| | B8_CC - HCDR1 | | | |
| 943. | MSLN_13319- | artificial | Aa | RIYSSGSANYNPSLKS |
| | B8_CC - HCDR2 | | | |
| 944. | MSLN_13319- | artificial | Aa | EGQWRVPAQYYYFGMDV |
| | B8_CC - HCDR3 | | | |
| 945. | MSLN_13319- | artificial | Aa | RASQSVSSSYLA |
| | B8_CC - LCDR1 | | | |
| 946. | MSLN_13319- | artificial | Aa | GASSRAT |
| | B8_CC - LCDR2 | | | |
| 947. | MSLN_13319- | artificial | Aa | QQYGSSIT |
| | B8_CC - LCDR3 | | | |
| 948. | MSLN_13319- | artificial | Aa | QVQLQESGPGLVKPSETLSLTCTVSGGSISSY |
| | B8_CC - VH | | | YWSWIRQPAGKCLEWIGRIYSSGSANYNPSL |
| | | | | KSRVTMSVDTSKNQFSLKLNSVTAADTAVYYC |
| | | | | AREGQWRVPAQYYYFGMDVWGQGTTVTVSS |
| 949. | MSLN_13319- | artificial | Aa | EIVMTQSPGTLSLSPGERATLSCRASQSVSSS |
| | B8_CC - VL | | | YLAWYQQKPGQAPRLLIYGASSRATGIPDRFS |
| | | | | GSGSGTDFTLTISRLEPEDFAVYYCQQYGSSI |
| | | | | TFGCGTRLEIK |
| 950. | MSLN_18025- | artificial | Aa | SSSYFWV |
| | E3_CC - HCDR1 | | | |
| 951. | MSLN_18025- | artificial | Aa | SIYYSGSTYYNPSLKS |
| | E3_CC - HCDR2 | | | |
| 952. | MSLN_18025- | artificial | Aa | LPRGDRMTFDI |
| | E3_CC - HCDR3 | | | |
| 953. | MSLN_18025- | artificial | Aa | RASQSVSSSYLA |
| | E3_CC - LCDR1 | | | |
| 954. | MSLN_18025- | artificial | Aa | GASSRAT |
| | E3_CC - LCDR2 | | | |
| 955. | MSLN_18025- | artificial | Aa | QQYGSSPFT |
| | E3_CC - LCDR3 | | | |
| 956. | MSLN_18025- | artificial | Aa | QVQLQESGPGLVKPSETLSLTCTVSGGSISSS |
| | E3_CC - VH | | | SYFWVWIRQPPGKCLEWIGSIYYSGSTYYNPS |
| | | | | LKSRVTISVDTSKNQFSLKLNSVTAADTAVYY |
| | | | | CARLPRGDRMTFDIWGQGTMVTVSS |
| 957. | MSLN_18025- | artificial | Aa | EIVLTQSPGTLSLSPGERATLSCRASQSVSSS |
| | E3_CC - VL | | | YLAWYQQKPGQAPRLLIYGASSRATGIPDRFS |
| | | | | GSGSGTDFTLTISRLEPEDFAVYYCQQYGSSP |
| | | | | FTFGCGTKLEIK |
| 958. | MSLN_18026- | artificial | Aa | SYGMH |
| | C1_CC - | | | |
| | HCDR1 | | | |
| 959. | MSLN_18026- | artificial | Aa | VIWNRYSNKYYADAVKG |
| | C1_CC - | | | |
| | HCDR2 | | | |
| 960. | MSLN_18026- | artificial | Aa | DVPYYYGMDV |
| | C1_CC - | | | |
| | HCDR3 | | | |
| 961. | MSLN_18026- | artificial | Aa | TRSSGSIGDNYVQ |
| | C1_CC - LCDR1 | | | |
| 962. | MSLN_18026- | artificial | Aa | ENNQRPS |
| | C1_CC - LCDR2 | | | |
| 963. | MSLN_18026- | artificial | Aa | QSYHGSNVV |
| | C1_CC - LCDR3 | | | |
| 964. | MSLN_18026- | artificial | Aa | QVQLVESGGGVVLPGRSLRLSCAASGFPFSS |
| | C1_CC - VH | | | YGMHWVRQAPGKCLEWVAVIWNRYSNKYYA |
| | | | | DAVKGRFTISRDNSKNTLYLQMNSLRAEDTAV |
| | | | | YYCARDVPYYYGMDVWGQGTTVTVSS |
| 965. | MSLN_18026- | artificial | Aa | NFMLTQPHSVSESPGKTVIISCTRSSGSIGDNY |
| | C1_CC - VL | | | VQWYQQRPGSSPTTVIYENNQRPSGVPDRFS |
| | | | | GSIDSSSNSASLTISGLKTEDEADYYCQSYHG |
| | | | | SNVVFGCGTKLTVL |
| 966. | MSLN_18035- | artificial | Aa | SYGMH |
| | B6_CC - HCDR1 | | | |
| 967. | MSLN_18035- | artificial | Aa | VIWNDASNKYYADAVKG |
| | B6_CC - HCDR2 | | | |
| 968. | MSLN_18035- | artificial | Aa | DVPYYYGMDV |
| | B6_CC - HCDR3 | | | |
| 969. | MSLN_18035- | artificial | Aa | TRSSGSIGDNYVQ |
| | B6_CC - LCDR1 | | | |
| 970. | MSLN_18035- | artificial | Aa | ENNQRPS |
| | B6_CC - LCDR2 | | | |
| 971. | MSLN_18035- | artificial | Aa | QSYQQSNVV |
| | B6_CC - LCDR3 | | | |
| 972. | MSLN_18035- | artificial | Aa | QVQLVESGGGVVLPGRSLRLSCAASGFPFSS |
| | B6_CC - VH | | | YGMHWVRQAPGKCLEWVAVIWNDASNKYYA |
| | | | | DAVKGRFTISRDNSKNTLYLQMNSLRAEDTAV |
| | | | | YYCARDVPYYYGMDVWGQGTTVTVSS |
| 973. | MSLN_18035- | artificial | Aa | NFMLTQPHSVSESPGKTVIISCTRSSGSIGDNY |
| | B6_CC - VL | | | VQWYQQRPGSSPTTVIYENNQRPSGVPDRFS |
| | | | | GSIDSSSNSASLTISGLKTEDEADYYCQSYQQ |
| | | | | SNVVFGCGTKLTVL |
| 974. | MSLN_18036- | artificial | Aa | SYAMS |
| | C10_CC - | | | |
| | HCDR1 | | | |
| 975. | MSLN_18036- | artificial | Aa | AISGSGEFSYYAAAVKG |
| | C10_CC - | | | |
| | HCDR2 | | | |
| 976. | MSLN_18036- | artificial | Aa | VRNYYGSGSLDY |
| | C10_CC - | | | |
| | HCDR3 | | | |
| 977. | MSLN_18036- | artificial | Aa | RASQSVSSTYLA |
| | C10_CC - | | | |
| | LCDR1 | | | |
| 978. | MSLN_18036- | artificial | Aa | GASIRAT |
| | C10_CC - | | | |
| | LCDR2 | | | |
| 979. | MSLN_18036- | artificial | Aa | QQYGSSLT |
| | C10_CC - | | | |
| | LCDR3 | | | |
| 980. | MSLN_18036- | artificial | Aa | EVQLLESGGGVVQPGRSLRLSCAASGFTFSS |
| | C10_CC - VH | | | YAMSWVRQAPGKCLEWVSAISGSGEFSYYAA |
| | | | | AVKGRFTISRDNSKNTLYLQMNSLRAEDTAVY |
| | | | | YCAKVRNYYGSGSLDYWGQGTLVTVSS |
| 981. | MSLN_18036- | artificial | Aa | EIVLTQSPGTLSLSPGERATLSCRASQSVSST |
| | C10_CC - VL | | | YLAWYQQKPGQAPRLLIYGASIRATGIPDRFS |
| | | | | GSGSGTDFTLTISRLEPEDFAVYYCQQYGSSL |
| | | | | TFGCGTKVEIK |
| 982. | MSLN_18036- | artificial | Aa | SYAMS |
| | C5_CC - | | | |
| | HCDR1 | | | |
| 983. | MSLN_18036- | artificial | Aa | AISGSGEQWYYAPSVKG |
| | C5_CC - | | | |
| | HCDR2 | | | |
| 984. | MSLN_18036- | artificial | Aa | VRNYYGSGSLDY |
| | C5_CC - | | | |
| | HCDR3 | | | |
| 985. | MSLN_18036- | artificial | Aa | RASQSFSSAYLA |
| | C5_CC - LCDR1 | | | |
| 986. | MSLN_18036- | artificial | Aa | GASIRAT |
| | C5_CC - LCDR2 | | | |
| 987. | MSLN_18036- | artificial | Aa | QQYGSSLT |
| | C5_CC - LCDR3 | | | |
| 988. | MSLN_18036- | artificial | Aa | EVQLLESGGGVVQPGRSLRLSCAASGFTFSS |
| | C5_CC - VH | | | YAMSWVRQAPGKCLEWVSAISGSGEQWYYA |
| | | | | PSVKGRFTISRDNSKNTLYLQMNSLRAEDTAV |
| | | | | YYCAKVRNYYGSGSLDYWGQGTLVTVSS |
| 989. | MSLN_18036- | artificial | Aa | EIVLTQSPGTLSLSPGERATLSCRASQSFSSA |
| | C5_CC - VL | | | YLAWYQQKPGQAPRLLIYGASIRATGIPDRFS |
| | | | | GSGSGTDFTLTISRLEPEDFAVYYCQQYGSSL |
| | | | | TFGCGTKVEIK |
| 990. | MSLN_18037- | artificial | Aa | SYAMS |
| | B3_CC - HCDR1 | | | |
| 991. | MSLN_18037- | artificial | Aa | AISGSGGSTYYAPSVKG |
| | B3_CC - HCDR2 | | | |
| 992. | MSLN_18037- | artificial | Aa | EGYYPVSGYPLYYYFGMDV |
| | B3_CC - HCDR3 | | | |
| 993. | MSLN_18037- | artificial | Aa | RASQSVSSSYLA |
| | B3_CC - LCDR1 | | | |
| 994. | MSLN_18037- | artificial | Aa | GASSRAT |
| | B3_CC - LCDR2 | | | |
| 995. | MSLN_18037- | artificial | Aa | QQYGSSPIFT |
| | B3_CC - LCDR3 | | | |
| 996. | MSLN_18037- | artificial | Aa | EVQLLESGGGLVQPGGSLRLSCAASGFTFSS |
| | B3_CC - VH | | | YAMSWVRQAPGKCLEWVSAISGSGGSTYYA |
| | | | | PSVKGRFTISRDNSKNTLYLQMNSLRAEDTAV |
| | | | | YYCAKEGYYPVSGYPLYYYFGMDVWGQGTT |
| | | | | VTVSS |
| 997. | MSLN_18037- | artificial | Aa | EIVLTQSPGTLSLSPGERATLSCRASQSVSSS |
| | B3_CC - VL | | | YLAWYQQKPGQAPRLLIYGASSRATGIPDRFS |
| | | | | GSGSGTDFTLTISRLEPEDFAVYYCQQYGSSP |
| | | | | IFTFGCGTKVEIK |
| 998. | MSLN_18037- | artificial | Aa | SYAMS |
| | G4_CC - | | | |
| | HCDR1 | | | |
| 999. | MSLN_18037- | artificial | Aa | AISGSGGSTYYAGNVKG |
| | G4_CC - | | | |
| | HCDR2 | | | |
| 1000. | MSLN_18037- | artificial | Aa | EGYYPTSGYPLYYYFGMDV |
| | G4_CC - | | | |
| | HCDR3 | | | |
| 1001. | MSLN_18037- | artificial | Aa | RASQSVSSSYLA |
| | G4_CC - LCDR1 | | | |
| 1002. | MSLN_18037- | artificial | Aa | GASSRAT |
| | G4_CC - LCDR2 | | | |
| 1003. | MSLN_18037- | artificial | Aa | QQYGSSPIFT |
| | G4_CC - LCDR3 | | | |
| 1004. | MSLN_18037- | artificial | Aa | EVQLLESGGGLVQPGGSLRLSCAASGFTFSS |
| | G4_CC - VH | | | YAMSWVRQAPGKCLEWVSAISGSGGSTYYA |
| | | | | GNVKGRFTISRDNSKNTLYLQMNSLRAEDTAV |
| | | | | YYCAKEGYYPTSGYPLYYYFGMDVWGQGTT |
| | | | | VTVSS |
| 1005. | MSLN_18037- | artificial | Aa | EIVLTQSPGTLSLSPGERATLSCRASQSVSSS |
| | G4_CC - VL | | | YLAWYQQKPGQAPRLLIYGASSRATGIPDRFS |
| | | | | GSGSGTDFTLTISRLEPEDFAVYYCQQYGSSP |
| | | | | IFTFGCGTKVEIK |
| 1006. | MSLN_18126- | artificial | Aa | SYGMH |
| | H2_CC - | | | |
| | HCDR1 | | | |
| 1007. | MSLN_18126- | artificial | Aa | VIGSRESNKNYAESVKG |
| | H2_CC - | | | |
| | HCDR2 | | | |
| 1008. | MSLN_18126- | artificial | Aa | ALRIAVAASYYYYGLDV |
| | H2_CC - | | | |
| | HCDR3 | | | |
| 1009. | MSLN_18126- | artificial | Aa | RASQSVRSFLN |
| | H2_CC - LCDR1 | | | |
| 1010. | MSLN_18126- | artificial | Aa | TASSLQS |
| | H2_CC - LCDR2 | | | |
| 1011. | MSLN_18126- | artificial | Aa | QQSYEMPIT |
| | H2_CC - LCDR3 | | | |
| 1012. | MSLN_18126- | artificial | Aa | QVQLVESGGGVVQPGRSLRLSCAASGFTFSS |
| | H2_CC - VH | | | YGMHWVRQAPGKCLEWVAVIGSRESNKNYA |
| | | | | ESVKGRFTISRDNSKNTLYLQMNSLRAEDTAV |
| | | | | YYCASALRIAVAASYYYYGLDVWGQGTTVTV |
| | | | | SS |
| 1013. | MSLN_18126- | artificial | Aa | EIQMTQSPSSLSASVGDRVTITCRASQSVRSF |
| | H2_CC - VL | | | LNWYQQKPGKAPKLLIFTASSLQSGVPSRFSG |
| | | | | SGSGTDFTLTISSLQPEDFATYYCQQSYEMPI |
| | | | | TFGCGTRLEIK |
| 1014. | MSLN_18183- | artificial | Aa | SYGMG |
| | C2_CC - | | | |
| | HCDR1 | | | |
| 1015. | MSLN_18183- | artificial | Aa | VISYEASNKYYAEAVKG |
| | C2_CC - | | | |
| | HCDR2 | | | |
| 1016. | MSLN_18183- | artificial | Aa | EGAHFGSGSYYPLYYYYAMDV |
| | C2_CC - | | | |
| | HCDR3 | | | |
| 1017. | MSLN_18183- | artificial | Aa | RASQSVSSSYLA |
| | C2_CC - LCDR1 | | | |
| 1018. | MSLN_18183- | artificial | Aa | GASIRAT |
| | C2_CC - LCDR2 | | | |
| 1019. | MSLN_18183- | artificial | Aa | QQYGSSPIFT |
| | C2_CC - LCDR3 | | | |
| 1020. | MSLN_18183- | artificial | Aa | QVQLVESGGGVVQPGRSLRLSCAASGFTFSS |
| | C2_CC - VH | | | YGMGWVRQAPGKCLEWVAVISYEASNKYYA |
| | | | | EAVKGRFTISRDNSKNTLYLQMNSLRAEDTAV |
| | | | | YYCAREGAHFGSGSYYPLYYYYAMDVWGQG |
| | | | | TTVTVSS |
| 1021. | MSLN_18183- | artificial | Aa | EIVLTQSPGTLSLSPGERATLSCRASQSVSSS |
| | C2_CC - VL | | | YLAWYQQKPGQAPRLLIYGASIRATGIPDRFS |
| | | | | GSGSGTDFTLTISRLEPEDFAVYYCQQYGSSP |
| | | | | IFTFGCGTKVEIK |
| 1022. | MSLN_18201- | artificial | Aa | DYYMT |
| | G11_CC - | | | |
| | HCDR1 | | | |
| 1023. | MSLN_18201- | artificial | Aa | YISSSGSTIYYAEAVKG |
| | G11_CC - | | | |
| | HCDR2 | | | |
| 1024. | MSLN_18201- | artificial | Aa | DRNSHFDY |
| | G11_CC - | | | |
| | HCDR3 | | | |
| 1025. | MSLN_18201- | artificial | Aa | RASQGIRTWLA |
| | G11_CC - | | | |
| | LCDR1 | | | |
| 1026. | MSLN_18201- | artificial | Aa | GASGLQS |
| | G11_CC - | | | |
| | LCDR2 | | | |
| 1027. | MSLN_18201- | artificial | Aa | QQAESFPRT |
| | G11_CC - | | | |
| | LCDR3 | | | |
| 1028. | MSLN_18201- | artificial | Aa | QVQLVESGGGLVKPGGSLRLSCAASGFTFSD |
| | G11_CC - VH | | | YYMTWIRQAPGKCLEWLSYISSSGSTIYYAEA |
| | | | | VKGRFTISRDNAKNSLFLQMNSLRAEDTAVYY |
| | | | | CARDRNSHFDYWGQGTLVTVSS |
| 1029. | MSLN_18201- | artificial | Aa | EIQMTQSPSSVSASVGDRVTITCRASQGIRTW |
| | G11_CC - VL | | | LAWYQQKPGKAPKLLIYGASGLQSGVPSRFS |
| | | | | GSGSGTDFTLTISSLQPEDFATYYCQQAESFP |
| | | | | RTFGCGTKVEIK |
| 1030. | MSLN_MS_R4L | artificial | Aa | GYYIH |
| | _CC - HCDR1 | | | |
| 1031. | MSLN_MS_R4L | artificial | Aa | WINPNSGGTNYAQKFQG |
| | _CC - HCDR2 | | | |
| 1032. | MSLN_MS_R4L | artificial | Aa | VEAVAGREYYYFSGMDV |
| | _CC - HCDR3 | | | |
| 1033. | MSLN_MS_R4L | artificial | Aa | SGEKLGDKYVY |
| | _CC - LCDR1 | | | |
| 1034. | MSLN_MS_R4L | artificial | Aa | QSTKRPS |
| | _CC - LCDR2 | | | |
| 1035. | MSLN_MS_R4L | artificial | Aa | QAYHASTAV |
| | _CC - LCDR3 | | | |
| 1036. | MSLN_MS_R4L | artificial | Aa | QVQLVQSGAEVKKPGASVKVSCKASGYTFTG |
| | _CC - VH | | | YYIHWVRQAPGQCLEWMGWINPNSGGTNYA |
| | | | | QKFQGRVTMTRDTSISTAYMELSRLRSDDTAV |
| | | | | YYCARVEAVAGREYYYFSGMDVWGQGTTVT |
| | | | | VSS |
| 1037. | MSLN_MS_R4L | artificial | Aa | SYELTQPPSVSVSPGQTASITCSGEKLGDKYV |
| | _CC - VL | | | YWYQQKPGQSPVLVIYQSTKRPSGVPERFSG |
| | | | | SNSGNTATLTISGTQAMDEADYYCQAYHAST |
| | | | | AVFGCGTKLTVL |
| 1038. | MSLN_R195L_C | artificial | Aa | SYAMS |
| | C - HCDR1 | | | |
| 1039. | MSLN_R195L_C | artificial | Aa | AISGSGEFSYYAAAVKG |
| | C - HCDR2 | | | |
| 1040. | MSLN_R195L_C | artificial | Aa | VRNYYGSGSLDY |
| | C - HCDR3 | | | |
| 1041. | MSLN_R195L_C | artificial | Aa | RASQSVSSTYLA |
| | C - LCDR1 | | | |
| 1042. | MSLN_R195L_C | artificial | Aa | GASIRAT |
| | C - LCDR2 | | | |
| 1043. | MSLN_R195L_C | artificial | Aa | QQYQSSLT |
| | C - LCDR3 | | | |
| 1044. | MSLN_R195L_C | artificial | Aa | EVQLLESGGGVVQPGRSLRLSCAASGFTFSS |
| | C - VH | | | YAMSWVRQAPGKCLEWVSAISGSGEFSYYAA |
| | | | | AVKGRFTISRDNSKNTLYLQMNSLRAEDTAVY |
| | | | | YCAKVRNYYGSGSLDYWGQGTLVTVSS |
| 1045. | MSLN_R195L_C | artificial | Aa | EIVLTQSPGTLSLSPGERATLSCRASQSVSST |
| | C - VL | | | YLAWYQQKPGQAPRLLIYGASIRATGIPDRFS |
| | | | | GSGSGTDFTLTISRLEPEDFAVYYCQQYQSSL |
| | | | | TFGCGTKVEIK |
| 1046. | scFv_anti_CDH1 | artificial | Aa | SYGMH |
| | 9_2G6.007 CC - | | | |
| | HCDR1 | | | |
| 1047. | scFv_anti_CDH1 | artificial | Aa | FIWYEGSNKYYAESVKD |
| | 9_2G6.007 CC- | | | |
| | HCDR2 | | | |
| 1048. | scFv_anti_CDH1 | artificial | Aa | RAGIIGTIGYYYGMDV |
| | 9_2G6.007 CC- | | | |
| | HCDR3 | | | |
| 1049. | scFv_anti_CDH1 | artificial | Aa | SGDRLGEKYTS |
| | 9_2G6.007 CC- | | | |
| | LCDR1 | | | |
| 1050. | scFv_anti_CDH1 | artificial | Aa | QDTKRPS |
| | 9_2G6.007 CC- | | | |
| | LCDR2 | | | |
| 1051. | scFv_anti_CDH1 | artificial | Aa | QAWESSTVV |
| | 9_2G6.007 CC- | | | |
| | LCDR3 | | | |
| 1052. | CDH19_2G6.00 | artificial | Aa | QVQLVESGGGVVQPGGSLRLSCAASGFTFSS |
| | 7 CC- VH | | | YGMHWVRQAPGKCLEWVAFIWYEGSNKYYA |
| | | | | ESVKDRFTISRDNSKNTLYLQMNSLRAEDTAV |
| | | | | YYCARRAGIIGTIGYYYGMDVWGQGTTVTVSS |
| 1053. | CDH19_2G6.00 | artificial | Aa | SYELTQPPSVSVSPGQTASITCSGDRLGEKYT |
| | 7 CC- VL | | | SWYQQRPGQSPLLVIYQDTKRPSGIPERFSG |
| | | | | SNSGNTATLTISGTQAMDEADYYCQAWESST |
| | | | | VVFGCGTKLTVLS |
| 1054. | scFv_anti_FOLR | artificial | Aa | SNSVIWN |
| | 1_C145209_(2A | | | |
| | 3) - HCDR1 | | | |
| 1055. | scFv_anti_FOLR | artificial | Aa | RTYYRSKWYNDYAVSVKS |
| | 1_C145209_(2A | | | |
| | 3) - HCDR2 | | | |
| 1056. | scFv_anti_FOLR | artificial | Aa | TVYYYGMDV |
| | 1_C145209_(2A | | | |
| | 3) - HCDR3 | | | |
| 1057. | scFv_anti_FOLR | artificial | Aa | SGDKLGNNYAA |
| | 1_C145209_(2A | | | |
| | 3) - LCDR1 | | | |
| 1058. | scFv_anti_FOLR | artificial | Aa | QDSKRPS |
| | 1_C145209_(2A | | | |
| | 3) - LCDR2 | | | |
| 1059. | scFv_anti_FOLR | artificial | Aa | QSWDSSTVV |
| | 1_C145209_(2A | | | |
| | 3) - LCDR3 | | | |
| 1060. | FOLR1_C14520 | artificial | Aa | QVQLQQSGPGLVKPSQTLSLTCAISGDSVSS |
| | 9_(2A3) - VH | | | NSVIWNWIRQSPSRGLEWLGRTYYRSKWYN |
| | | | | DYAVSVKSRITINPDTSKNQFSLQLNSVTPEDT |
| | | | | AVYYCAGTVYYYGMDVWGQGATVTVSS |
| 1061. | FOLR1_C14520 | artificial | Aa | SYELTQPPSVSVSPGQTGSITCSGDKLGNNY |
| | 9_(2A3) - VL | | | AAWYQQKPGQSPVLVIYQDSKRPSGIPERFS |
| | | | | GSNSGNTATLTISGTQAVDEADYYCQSWDSS |
| | | | | TVVFGGGTKLTVLGS |
| 1062. | scFv_anti_MSL | artificial | Aa | SGANYWT |
| | N_C147862_(6F | | | |
| | 12) - HCDR1 | | | |
| 1063. | scFv_anti_MSL | artificial | Aa | YIYYSGSTYLNPSLRG |
| | N_C147862_(6F | | | |
| | 12) - HCDR2 | | | |
| 1064. | scFv_anti_MSL | artificial | Aa | ESGSSYGFDY |
| | N_C147862_(6F | | | |
| | 12) - HCDR3 | | | |
| 1065. | scFv_anti_MSL | artificial | Aa | RTSQSITSYLN |
| | N_C147862_(6F | | | |
| | 12) - LCDR1 | | | |
| 1066. | scFv_anti_MSL | artificial | Aa | ASSSLQS |
| | N_C147862_(6F | | | |
| | 12) - LCDR2 | | | |
| 1067. | scFv_anti_MSL | artificial | Aa | QQSYSGPFT |
| | N_C147862_(6F | | | |
| | 12) - LCDR3 | | | |
| 1068. | MSLN_C147862 | artificial | Aa | QVQLQESGPGLVKPSQTLSLTCTVSGGSISSG |
| | _(6F12) - VH | | | ANYWTWIRQHPGKGLEWIGYIYYSGSTYLNPS |
| | | | | LRGRVTMSVDTSKNQFSLKLSSVTAADTAVYY |
| | | | | CARESGSSYGFDYWGQGTLVTVSS |
| 1069. | MSLN_C147862 | artificial | Aa | DIQMTQSPSSLSASVGDRVTITCRTSQSITSYL |
| | _(6F12) - VL | | | NWYQQKPGQAPKLLIYASSSLQSGVPSRFSG |
| | | | | SGSGTDFTLTISSLQPEDFATYYCQQSYSGPF |
| | | | | TFGPGTKVDIKRS |
| 1070. | CH3 15-E11 CC | artificial | na | CAGGTTCAGTTGGTTCAGTCTGGCGCCGAA |
| | x I2Lopt x G4 x | | | GTGAAGAAACCAGGCGCTTCTGTGAAGGTG |
| | scFc SEFL2 | | | TCCTGCAAGGCCTCTGGCTACACCTTTACCA |
| | clipopt x G4 x | | | ACTACTGGATGAACTGGGTCCGACAGGCTC |
| | MS 15-B12 CC x | | | CTGGCCAGTGTCTGGAATGGATGGGCAATA |
| | I2L_GQ - | | | TCGCTTACGGCGTGAAGGGCACCAACTACA |
| | Nucleotide | | | ACCAGAAATTCCAGGGCAGAGTGACCATGA |
| | Sequence | | | CCGTGGACACCTCTTCCTCCACCGCCTACA |
| | | | | TGGAACTGTCCCGGCTGAGATCTGACGACA |
| | | | | CCGCCGTGTACTACTGCGCCACCAGATACT |
| | | | | TCTACGTGATGGACTATTGGGGCCAGGGCA |
| | | | | CCCTGGTTACAGTTTCTTCTGGCGGCGGAG |
| | | | | GACAAGGCGGTGGTGGTCAAGGCGGAGGC |
| | | | | GGACAGGATATCCAGATGACCCAGTCTCCT |
| | | | | TCCAGCCTGTCTGCCTCTGTGGGCGACAGA |
| | | | | GTGACAATCACCTGTCGGGCCTCTCAGGAC |
| | | | | ATCTCCAACTACCTGAACTGGTATCAGCAGA |
| | | | | AACCCGGCAAGGTGCCCAAGCTGCTGATCT |
| | | | | ACTACACCTCCAGACTGCACTCCGGCGTGC |
| | | | | CCTCTAGATTTTCTGGCTCTGGATCTGGCAC |
| | | | | CGACTTCACCCTGACCATCAGTTCTCTGCAG |
| | | | | CCTGAGGACGTGGCCACCTACTACTGTGTG |
| | | | | CAGTACGCCCAGTTTCCTCTGACCTTCGGC |
| | | | | TGTGGCACCAAGGTGGAAATCAAAAGCGGT |
| | | | | GGCGGAGGCCAAGAGGTGCAGCTTGTTGAA |
| | | | | TCTGGCGGAGGATTGGTGCAGCCTGGCGG |
| | | | | ATCTCTGAAGCTGTCTTGTGCCGCCTCCGG |
| | | | | CTTCACCTTCAACAAATACGCCATGAATTGG |
| | | | | GTTCGACAAGCCCCAGGCAAAGGCATGGAA |
| | | | | TGGGTCGCCCGGATCAGATCCAAGTACAAC |
| | | | | AACTACGCTACCTACTACGCCGACGCCGTG |
| | | | | AAGGACAGATTCACCATCTCTCGGGACGAC |
| | | | | TCCAAGAACACCCTGTACCTGCAGATGAAC |
| | | | | AACCTGAAAACCGAGGATACCGCCGTCTAT |
| | | | | TACTGTGTCAGAGCCGGCAACTTCGGCTCC |
| | | | | TCCTACATCTCCTACTTTGCCTACTGGGGAC |
| | | | | AGGGAACCCTCGTGACTGTTTCTAGCGGTG |
| | | | | GTGGCGGACAAGGTGGCGGTGGACAAGGC |
| | | | | GGCGGAGGCCAACAAACAGTGGTCACACAA |
| | | | | GAGCCCAGCCTGACAGTGTCTCCTGGCGGA |
| | | | | ACAGTGACCATCACATGTGGATCTTCTACCG |
| | | | | GCGCTGTGACCTCCGGCAACTACCCCAATT |
| | | | | GGATCCAGAAGAAGCCCGGCCAGGCTCCTA |
| | | | | GAGGACTGATCGGCGGAACAAAGTTTCTGG |
| | | | | CCCCTGGCACACCAGCCAGATTCTCAGGAT |
| | | | | CTCTGGAAGGCGGCAAGGCCGCTCTGACAT |
| | | | | TGTCTGGCGTTCAGCCAGAGGATGAGGCCG |
| | | | | AGTACTATTGCGTGCTGTACTACTCCAACAG |
| | | | | ATGGGTGTTCGGCTCCGGCACAAAGCTGAC |
| | | | | AGTTCTCGGAGGTGGCGGATGCCCTCCTTG |
| | | | | TCCTGCTCCTGAATTGCTCGGCGGACCCTC |
| | | | | CGTGTTCCTGTTTCCTCCAAAGCCTAAGGAC |
| | | | | ACCCTGATGATCTCTCGGACCCCTGAAGTG |
| | | | | ACCTGCGTGGTGGTGGATGTGTCCCACGAG |
| | | | | GAACCAGAAGTGAAGTTCAATTGGTACGTG |
| | | | | GACGGCGTGGAAGTGCACAACGCTAAGACC |
| | | | | AAGCCTTGCGAGGAACAGTACGGCAGCACC |
| | | | | TACAGATGTGTGTCCGTGCTGACCGTGCTG |
| | | | | CACCAGGACTGGCTGAATGGCAAAGAGTAC |
| | | | | AAGTGCAAGGTGTCCAACAAGGCACTGCCC |
| | | | | GCTCCTATCGAAAAGACCATCTCCAAGGCTA |
| | | | | AGGGCCAGCCTCGGGAACCTCAGGTTTACA |
| | | | | CCCTGCCTCCATCTCGGGAAGAGATGACCA |
| | | | | AGAACCAGGTGTCCCTGACCTGCCTGGTCA |
| | | | | AGGGCTTCTACCCTTCCGATATCGCCGTGG |
| | | | | AATGGGAGTCCAATGGCCAGCCTGAGAACA |
| | | | | ACTACAAGACCACACCTCCTGTGCTGGACT |
| | | | | CCGACGGCTCATTCTTCCTGTACTCCAAGCT |
| | | | | GACTGTGGACAAGTCTCGGTGGCAGCAGG |
| | | | | GCAACGTGTTCTCCTGTTCTGTGATGCACGA |
| | | | | GGCCCTGCACAACCACTACACCCAGAAGTC |
| | | | | CCTGTCTCTGAGCCCTGGCAAAGGTGGTGG |
| | | | | CGGTCAAGGCGGTGGTGGCCAAGGCGGCG |
| | | | | GAGGACAAGGTGGCGGAGGCCAAGGTGGT |
| | | | | GGCGGACAAGGCGGAGGTGGTCAATGTCC |
| | | | | TCCTTGTCCAGCACCAGAACTCCTCGGAGG |
| | | | | CCCTTCTGTGTTTCTGTTCCCACCTAAGCCA |
| | | | | AAGGATACACTCATGATCAGCAGGACTCCC |
| | | | | GAAGTGACATGTGTCGTCGTGGACGTTTCC |
| | | | | CATGAAGAACCCGAAGTCAAGTTTAATTGGT |
| | | | | ATGTCGATGGCGTCGAGGTCCACAATGCCA |
| | | | | AGACAAAGCCCTGTGAAGAACAATACGGGT |
| | | | | CCACCTATAGATGCGTCAGCGTCCTGACAG |
| | | | | TCCTGCATCAGGATTGGCTCAACGGGAAAG |
| | | | | AATACAAATGTAAAGTCTCTAACAAGGCTCT |
| | | | | CCCAGCACCAATCGAGAAAACCATTAGCAA |
| | | | | GGCCAAAGGACAGCCCCGCGAGCCACAAG |
| | | | | TGTATACCCTGCCACCTAGCCGCGAGGAAA |
| | | | | TGACAAAGAATCAAGTCTCTCTGACCTGTCT |
| | | | | CGTGAAGGGGTTTTACCCCAGCGACATTGC |
| | | | | CGTCGAGTGGGAGTCTAACGGACAACCCGA |
| | | | | AAACAATTATAAGACAACCCCACCTGTCCTG |
| | | | | GACAGCGACGGCTCATTTTTTCTCTACTCTA |
| | | | | AACTCACCGTGGATAAGTCCAGATGGCAAC |
| | | | | AGGGAAATGTGTTCAGCTGCAGCGTGATGC |
| | | | | ATGAAGCTCTCCACAATCATTATACCCAGAA |
| | | | | AAGCCTGAGCTTGTCTCCCGGCAAAGGTGG |
| | | | | CGGAGGACAGGTTCAGTTGCAAGAGTCTGG |
| | | | | ACCTGGCCTCGTGAAGCCTTCTGAGACACT |
| | | | | GAGCCTGACCTGTACCGTGTCTGGCGGCTC |
| | | | | CATCTCCTCCAGCTCTTACTTCTGGGGCTG |
| | | | | GATCAGACAGCCTCCAGGCAAGTGCCTCGA |
| | | | | GTGGATCGGCAACATCTACTACTCCGGCTC |
| | | | | CAGCAACTACAATCCTAGCCTGAAGTCCCG |
| | | | | CGTGACAATCTCTGTGGATACCTCTAAGAAC |
| | | | | CAGTTTAGCCTCAAGCTGTCCAGCGTGACC |
| | | | | GCCGCTGATACCGCTGTGTATTATTGCGCTA |
| | | | | GACTGCCCAGAGGCGACCGGGATGCTTTCG |
| | | | | ATATTTGGGGACAAGGCACAATGGTCACCG |
| | | | | TTTCTAGCGGAGGCGGTGGCCAAGGTGGC |
| | | | | GGAGGCCAAGGCGGCGGTGGTCAAGATATT |
| | | | | GTGATGACACAGAGCCCCTCTAGCCTGAGC |
| | | | | GCTTCCGTGGGAGATCGCGTGACCATTACC |
| | | | | TGTAGAGCCAGCCAGGGCATCAGCAATTAC |
| | | | | CTGGCCTGGTATCAACAAAAGCCTGGGAAA |
| | | | | GTCCCTAAGCTCCTCATCTACGCCGCTTCCA |
| | | | | CACTGCAGAGCGGCGTGCCAAGCAGATTCA |
| | | | | GTGGATCCGGCAGCGGAACCGACTTTACTC |
| | | | | TGACTATCTCCAGCCTGCAGCCAGAAGATTT |
| | | | | CGCTACCTATTACTGCCAGCAGTCCTACAG |
| | | | | CACCCCTTTCACCTTTGGCTGCGGAACTAA |
| | | | | GGTCGAGATCAAGAGCGGAGGTGGTGGAC |
| | | | | AAGAGGTCCAGTTGGTCGAGTCAGGTGGCG |
| | | | | GCTTGGTCCAACCAGGTGGAAGCCTGAAAC |
| | | | | TGAGCTGCGCCGCTTCTGGGTTTACTTTTAA |
| | | | | CAAATATGCTATGAACTGGGTTCGCCAGGC |
| | | | | ACCTGGAAAAGGCATGGAATGGGTTGCCAG |
| | | | | AATCCGCAGCAAGTATAACAATTATGCCACC |
| | | | | TATTATGCCGATGCTGTCAAGGATCGGTTCA |
| | | | | CCATCAGCAGGGACGATAGCAAGAATACCC |
| | | | | TCTATCTCCAAATGAACAATCTCAAGACAGA |
| | | | | GGACACAGCAGTGTACTATTGTGTTCGCGC |
| | | | | TGGCAACTTTGGCAGCAGCTACATCAGCTA |
| | | | | CTTCGCTTACTGGGGCCAAGGGACACTTGT |
| | | | | GACCGTTAGCAGCGGAGGCGGAGGACAAG |
| | | | | GTGGCGGAGGACAAGGCGGAGGTGGACAG |
| | | | | CAGACAGTTGTGACCCAAGAGCCTTCTCTG |
| | | | | ACTGTGTCACCAGGCGGCACCGTGACAATT |
| | | | | ACATGCGGAAGTTCCACAGGCGCCGTGACC |
| | | | | AGCGGCAATTATCCTAACTGGATTCAGAAAA |
| | | | | AACCTGGACAGGCCCCAAGAGGCCTGATTG |
| | | | | GAGGCACCAAATTTCTCGCTCCCGGCACTC |
| | | | | CTGCTCGGTTCTCTGGTAGTCTTGAAGGCG |
| | | | | GAAAAGCTGCCCTGACTCTCTCTGGCGTGC |
| | | | | AACCCGAAGATGAAGCTGAATATTACTGCGT |
| | | | | CCTCTACTATAGCAATCGCTGGGTTTTCGGA |
| | | | | AGCGGCACCAAGCTCACTGTCCTCTGA |
| 1071. | CH3 15- | artificial | na | CAGGTGCAGCTGGTTCAGTCTGGCGCCGAA |
| | E11_1_VAG_CC | | | GTGAAGAAACCTGGCGCCTCTGTGAAGGTG |
| | x I2L x G4 x | | | TCCTGCAAGGCTTCTGGCTACACCTTTACCA |
| | scFc x G4 x MS | | | ACTACTGGATGAACTGGGTCCGACAGGCCC |
| | 15-B12 CC x I2L | | | CTGGCCAGTGTTTGGAGTGGATGGGCAATA |
| | clipopt_DI, | | | TCGCTTACGGCGTGGCCGGCACCAACTACA |
| | AMG305 - | | | ACCAGAAATTCCAGGGCAGAGTGACAATGA |
| | Nucleotide | | | CCGTGGACACCTCCTCCTCCACCGCCTACA |
| | Sequence | | | TGGAACTGTCCCGGCTGAGATCTGACGACA |
| | | | | CCGCCGTGTACTACTGCGCCACCAGATACT |
| | | | | TCTACGTGATGGACTACTGGGGCCAGGGCA |
| | | | | CCCTGGTTACAGTTTCTTCTGGCGGCGGAG |
| | | | | GACAAGGCGGAGGTGGTCAAGGTGGTGGC |
| | | | | GGACAGGATATCCAGATGACCCAGTCTCCT |
| | | | | TCCAGCCTGTCTGCCTCTGTGGGCGACAGA |
| | | | | GTGACCATCACCTGTAGAGCCAGCCAGGAC |
| | | | | ATCTCCAACTACCTGAACTGGTATCAGCAGA |
| | | | | AACCCGGCAAGGTGCCCAAGCTGCTGATCT |
| | | | | ACTACACCTCTCGGCTGCACTCTGGCGTGC |
| | | | | CCTCTAGATTTTCTGGCTCCGGCTCTGGCA |
| | | | | CCGACTTTACCCTGACAATCTCCAGCCTGCA |
| | | | | GCCTGAGGATGTGGCCACCTACTACTGTGT |
| | | | | GCAGTACGCCCAGTTTCCTCTGACCTTCGG |
| | | | | CTGTGGCACCAAGGTGGAAATCAAGTCTGG |
| | | | | AGGCGGAGGCCAAGAGGTGCAGCTGGTGG |
| | | | | AGTCCGGCGGCGGCCTGGTGCAGCCCGGC |
| | | | | GGCTCCCTGAAGCTGTCCTGCGCCGCCTCC |
| | | | | GGCTTCACCTTCAACAAGTACGCCATGAACT |
| | | | | GGGTGAGGCAGGCCCCCGGCAAGGGCATG |
| | | | | GAGTGGGTGGCCAGGATCAGGTCCAAGTAC |
| | | | | AACAACTACGCCACCTACTACGCCGACGCC |
| | | | | GTGAAGGACAGGTTCACCATCTCCAGGGAC |
| | | | | GACTCCAAGAACACCCTGTACCTGCAGATG |
| | | | | AACAACCTGAAGACCGAGGACACCGCCGTG |
| | | | | TACTACTGCGTGAGGGCCGGCAACTTCGGC |
| | | | | TCCTCCTACATCTCCTACTTCGCCTACTGGG |
| | | | | GCCAGGGCACCCTGGTGACCGTGTCCTCC |
| | | | | GGCGGCGGCGGCCAAGGCGGCGGCGGCC |
| | | | | AAGGCGGCGGCGGCCAACAGACCGTGGTG |
| | | | | ACCCAGGAGCCCTCCCTGACCGTGTCCCCC |
| | | | | GGCGGCACCGTGACCATCACCTGCGGCTC |
| | | | | CTCCACCGGCGCCGTGACCTCCGGCAACTA |
| | | | | CCCCAACTGGATCCAGAAGAAGCCCGGCCA |
| | | | | GGCCCCCAGGGGCCTGATCGGCGGCACCA |
| | | | | AGTTCCTGGCCCCCGGCACCCCCGCCAGG |
| | | | | TTCTCCGGCTCCCTGGAGGGCGGCAAGGC |
| | | | | CGCCCTGACCCTGTCCGGCGTGCAGCCCG |
| | | | | AGGACGAGGCCGAGTACTACTGCGTGCTGT |
| | | | | ACTACTCCAACAGGTGGGTGTTCGGCTCCG |
| | | | | GCACCAAGCTGACCGTCCTAGGCGGAGGC |
| | | | | GGCTGCCCTCCTTGTCCTGCTCCTGAATTG |
| | | | | CTCGGCGGACCCTCCGTGTTCCTGTTTCCT |
| | | | | CCAAAGCCTAAGGACACCCTGATGATCTCT |
| | | | | CGTACGCCTGAAGTGACCTGCGTGGTGGTG |
| | | | | GATGTGTCCCACGAGGAACCCGAAGTGAAG |
| | | | | TTCAATTGGTACGTGGACGGCGTGGAAGTG |
| | | | | CACAACGCCAAGACAAAGCCCTGCGAGGAA |
| | | | | CAGTACGGCTCCACCTACAGATGCGTGTCC |
| | | | | GTGCTGACAGTGCTGCACCAGGATTGGCTG |
| | | | | AACGGCAAAGAGTACAAGTGCAAGGTGTCC |
| | | | | AACAAGGCCCTGCCTGCTCCTATCGAAAAG |
| | | | | ACCATCTCCAAGGCCAAGGGCCAGCCTAGA |
| | | | | GAGCCCCAGGTTTACACCCTGCCTCCAAGC |
| | | | | AGAGAAGAGATGACCAAGAACCAGGTGTCC |
| | | | | CTGACCTGCCTGGTCAAGGGCTTCTACCCT |
| | | | | TCCGATATCGCCGTGGAATGGGAGAGCAAT |
| | | | | GGACAGCCCGAGAACAACTACAAGACCACA |
| | | | | CCTCCTGTGCTGGACTCCGACGGCTCATTC |
| | | | | TTCCTGTACTCCAAGCTGACCGTGGACAAG |
| | | | | TCCAGATGGCAGCAGGGCAACGTGTTCTCC |
| | | | | TGCTCCGTGATGCACGAGGCCCTGCACAAT |
| | | | | CACTACACCCAGAAGTCCCTGTCTCTGTCC |
| | | | | CCTGGAAAAGGAGGCGGAGGACAAGGCGG |
| | | | | AGGTGGTCAAGGTGGTGGTGGCCAAGGCG |
| | | | | GAGGCGGACAAGGCGGCGGAGGACAAGGT |
| | | | | GGCGGTGGACAGTGTCCTCCATGTCCAGCA |
| | | | | CCTGAGCTTCTCGGAGGCCCTTCTGTGTTT |
| | | | | CTGTTCCCACCTAAGCCAAAGGATACACTCA |
| | | | | TGATCAGCCGCACACCTGAAGTCACATGTG |
| | | | | TCGTCGTGGATGTCTCTCATGAAGAACCAG |
| | | | | AAGTCAAGTTTAATTGGTATGTCGATGGCGT |
| | | | | CGAGGTCCACAATGCTAAGACCAAGCCTTG |
| | | | | TGAAGAACAATATGGCAGCACCTATCGCTGT |
| | | | | GTGTCTGTCCTGACCGTCCTGCATCAAGAC |
| | | | | TGGCTCAATGGGAAAGAATACAAATGCAAA |
| | | | | GTCTCTAACAAAGCTCTGCCCGCACCAATC |
| | | | | GAGAAAACCATCAGCAAGGCTAAAGGACAG |
| | | | | CCTCGCGAGCCTCAAGTGTATACCCTGCCA |
| | | | | CCTTCTCGCGAGGAAATGACAAAAAATCAAG |
| | | | | TCTCCCTCACCTGTCTCGTGAAGGGATTCTA |
| | | | | TCCCAGCGACATTGCCGTCGAGTGGGAGTC |
| | | | | TAATGGCCAGCCTGAAAACAATTATAAGACA |
| | | | | ACCCCACCTGTCCTGGACAGCGACGGCTCA |
| | | | | TTTTTTCTCTACTCTAAACTCACCGTGGATAA |
| | | | | GAGCCGGTGGCAACAGGGAAATGTGTTCAG |
| | | | | CTGTAGCGTGATGCATGAAGCTCTCCACAA |
| | | | | CCATTATACACAGAAGAGTCTGAGCCTGTCT |
| | | | | CCTGGCAAAGGCGGCGGAGGACAGGTGCA |
| | | | | ACTCCAGGAATCCGGGCCAGGGTTGGTGAA |
| | | | | ACCCAGCGAGACACTGTCTCTGACTTGCAC |
| | | | | TGTTTCTGGTGGCTCCATTTCCTCTAGCTCT |
| | | | | TACTTCTGGGGTTGGATACGGCAACCACCT |
| | | | | GGGAAGTGTCTCGAATGGATTGGTAACATC |
| | | | | TACTATAGTGGATCCTCCAACTACAATCCCA |
| | | | | GCCTGAAGAGTCGTGTGACTATCAGCGTTG |
| | | | | ACACCTCAAAGAATCAGTTCTCCCTTAAGCT |
| | | | | GAGTTCCGTGACAGCAGCAGATACAGCCGT |
| | | | | CTACTACTGTGCTCGACTTCCTAGGGGAGA |
| | | | | TCGGGATGCCTTCGACATTTGGGGTCAGGG |
| | | | | TACGATGGTAACAGTGTCTAGTGGAGGCGG |
| | | | | AGGTCAAGGCGGCGGAGGCCAAGGAGGAG |
| | | | | GCGGACAAGATATCGTGATGACCCAGAGCC |
| | | | | CATCAAGCCTGAGTGCTAGCGTTGGGGACA |
| | | | | GGGTCACTATCACTTGCAGAGCCTCACAGG |
| | | | | GGATTTCCAACTATCTGGCCTGGTATCAGCA |
| | | | | GAAACCTGGCAAGGTCCCCAAACTCCTGAT |
| | | | | ATATGCTGCAAGCACGCTGCAAAGCGGGGT |
| | | | | ACCCTCTCGCTTTTCTGGGTCTGGCTCTGG |
| | | | | CACAGACTTTACCCTGACCATCTCCAGTTTG |
| | | | | CAGCCTGAGGACTTTGCCACCTACTATTGC |
| | | | | CAGCAGTCCTACTCAACACCCTTCACCTTTG |
| | | | | GCTGTGGCACCAAGGTGGAGATCAAATCCG |
| | | | | GAGGCGGAGGACAAGAAGTCCAGCTGGTT |
| | | | | GAAAGTGGTGGCGGATTGGTTCAGCCAGGC |
| | | | | GGCTCTCTGAAGCTGTCTTGTGCTGCCTCC |
| | | | | GGCTTCACCTTCAACAAATACGCCATGAATT |
| | | | | GGGTTCGACAAGCCCCAGGCAAAGGCATG |
| | | | | GAATGGGTCGCCCGGATCAGATCCAAGTAC |
| | | | | AACAACTACGCTACCTACTACGCCGACGCC |
| | | | | GTGAAGGACCGGTTCACCATCTCCAGAGAT |
| | | | | GACTCCAAGAACACCCTGTACCTGCAGATG |
| | | | | AACAACCTCAAGACCGAGGATACCGCCGTC |
| | | | | TATTACTGTGTCAGAGCCGGCAACTTCGGC |
| | | | | TCCTCCTACATCTCCTACTTCGCCTACTGGG |
| | | | | GCCAGGGAACCCTTGTGACAGTCTCTAGTG |
| | | | | GCGGTGGTGGTCAAGGTGGTGGCGGCCAA |
| | | | | GGCGGTGGCGGACAACAAACAGTGGTCAC |
| | | | | CCAAGAGCCTAGCCTGACCGTTTCTCCTGG |
| | | | | CGGCACCGTGACCATCACATGCGGATCTTC |
| | | | | TACCGGCGCTGTGACCTCCGGCAACTACCC |
| | | | | CAATTGGATCCAGAAGAAGCCAGGCCAGGC |
| | | | | TCCTAGAGGACTGATCGGCGGCACAAAGTT |
| | | | | TCTGGCTCCCGGCACTCCCGCCAGATTTTC |
| | | | | TGGATCTCTGGAAGGCGGCAAGGCTGCTCT |
| | | | | GACATTGTCTGGCGTCCAGCCAGAGGATGA |
| | | | | GGCCGAGTACTATTGCGTGCTGTACTACTC |
| | | | | CAACAGATGGGTGTTCGGCTCCGGCACCAA |
| | | | | GCTGACAGTCCTATGA |
| 1072. | MS 83-C2 CC x | artificial | na | CAGGTGCAGCTGGTGGAATCTGGTGGCGG |
| | I2L x scFc x EP | | | AGTTGTGCAGCCTGGCAGATCCCTGAGACT |
| | 71-A5 CC x I2L | | | GTCTTGTGCCGCCTCCGGCTTCACCTTCTC |
| | (G4S)3 - | | | CTCTTATGGAATGGGCTGGGTCCGACAGGC |
| | COMBI#11 | | | CCCTGGCAAATGTTTGGAATGGGTCGCCGT |
| | (A8P) - | | | GATCTCCTACGAGGCCTCCAACAAGTACTA |
| | Nucleotide | | | CGCCGAGGCCGTGAAGGGCAGATTCACCAT |
| | Sequence | | | CTCCAGAGACAACTCCAAGAACACCCTGTA |
| | | | | CCTGCAGATGAACTCCCTGAGAGCCGAGGA |
| | | | | CACCGCCGTGTACTACTGTGCTAGAGAGGG |
| | | | | CGCCCATTTCGGCTCCGGCTCTTACTACCC |
| | | | | TCTGTACTACTACTACGCTATGGACGTGTGG |
| | | | | GGCCAGGGCACCACAGTGACAGTTTCTAGC |
| | | | | GGAGGCGGAGGAAGTGGGGGGGGAGGATC |
| | | | | TGGCGGTGGTGGTTCTGAAATCGTGCTGAC |
| | | | | CCAGTCTCCTGGCACACTGTCTTTGAGCCC |
| | | | | TGGCGAGAGAGCTACCCTGAGCTGTAGAGC |
| | | | | CTCTCAGTCCGTGTCCTCCTCTTACCTGGCC |
| | | | | TGGTATCAGCAGAAGCCCGGCCAGGCTCCT |
| | | | | AGACTGTTGATCTACGGCGCCTCCATCAGA |
| | | | | GCCACAGGCATCCCTGATAGATTCTCCGGC |
| | | | | AGCGGCTCTGGCACCGACTTCACCCTGACA |
| | | | | ATCTCTCGGCTGGAACCCGAGGACTTTGCT |
| | | | | GTGTACTATTGCCAGCAGTACGGCAGCTCC |
| | | | | CCTATCTTCACCTTTGGCTGCGGCACCAAG |
| | | | | GTGGAAATCAAGTCCGGGGGGGGAGGCTC |
| | | | | CGAGGTGCAGCTGGTGGAGTCCGGCGGCG |
| | | | | GCCTGGTGCAGCCCGGCGGCTCCCTGAAG |
| | | | | CTGTCCTGCGCCGCCTCCGGCTTCACCTTC |
| | | | | AACAAGTACGCCATGAACTGGGTGAGGCAG |
| | | | | GCCCCCGGCAAGGGCATGGAGTGGGTGGC |
| | | | | CAGGATCAGGTCCAAGTACAACAACTACGC |
| | | | | CACCTACTACGCCGACGCCGTGAAGGACAG |
| | | | | GTTCACCATCTCCAGGGACGACTCCAAGAA |
| | | | | CACCCTGTACCTGCAGATGAACAACCTGAA |
| | | | | GACCGAGGACACCGCCGTGTACTACTGCGT |
| | | | | GAGGGCCGGCAACTTCGGCTCCTCCTACAT |
| | | | | CTCCTACTTCGCCTACTGGGGCCAGGGCAC |
| | | | | CCTGGTGACCGTGTCCTCCGGCGGCGGCG |
| | | | | GCTCCGGCGGCGGCGGCTCCGGCGGCGG |
| | | | | CGGCTCCCAGACCGTGGTGACCCAGGAGC |
| | | | | CCTCCCTGACCGTGTCCCCCGGCGGCACC |
| | | | | GTGACCATCACCTGCGGCTCCTCCACCGGC |
| | | | | GCCGTGACCTCCGGCAACTACCCCAACTGG |
| | | | | ATCCAGAAGAAGCCCGGCCAGGCCCCCAG |
| | | | | GGGCCTGATCGGCGGCACCAAGTTCCTGG |
| | | | | CCCCCGGCACCCCCGCCAGGTTCTCCGGC |
| | | | | TCCCTGGAGGGCGGCAAGGCCGCCCTGAC |
| | | | | CCTGTCCGGCGTGCAGCCCGAGGACGAGG |
| | | | | CCGAGTACTACTGCGTGCTGTACTACTCCAA |
| | | | | CAGGTGGGTGTTCGGCTCCGGCACCAAGCT |
| | | | | GACCGTGCTAGGCGGCGGAGGATCTGGCG |
| | | | | GAGGTGGAAGCGGAGGCGGTGGATCTGAC |
| | | | | AAGACCCACACATGTCCTCCATGTCCCGCC |
| | | | | CCTGAACTGCTAGGCGGACCTAGCGTGTTC |
| | | | | CTGTTCCCCCCAAAGCCCAAGGACACCCTG |
| | | | | ATGATCAGCCGTACGCCCGAAGTGACCTGC |
| | | | | GTGGTGGTGGATGTGTCCCACGAGGACCCT |
| | | | | GAAGTGAAGTTCAATTGGTACGTGGACGGC |
| | | | | GTGGAAGTGCACAACGCCAAGACCAAGCCC |
| | | | | TGCGAGGAACAGTACGGCAGCACCTACAGA |
| | | | | TGCGTGTCCGTGCTGACCGTGCTGCATCAG |
| | | | | GACTGGCTGAACGGCAAAGAGTACAAGTGC |
| | | | | AAGGTGTCCAACAAGGCCCTGCCTGCCCCC |
| | | | | ATCGAGAAAACCATCAGCAAGGCCAAGGGC |
| | | | | CAGCCCCGCGAGCCTCAAGTGTATACCCTG |
| | | | | CCCCCTAGCCGGGAAGAGATGACCAAGAAC |
| | | | | CAGGTGTCCCTGACCTGTCTCGTGAAGGGC |
| | | | | TTCTACCCCTCCGATATCGCCGTGGAATGG |
| | | | | GAGAGCAACGGCCAGCCCGAGAACAACTAC |
| | | | | AAGACCACCCCCCCTGTGCTGGACAGCGAC |
| | | | | GGCTCATTCTTCCTGTACTCCAAACTGACCG |
| | | | | TGGACAAGAGCCGGTGGCAGCAGGGCAAC |
| | | | | GTGTTCAGCTGCAGCGTGATGCACGAGGCC |
| | | | | CTGCACAACCACTACACCCAGAAGTCCCTG |
| | | | | TCCCTGTCTCCCGGGAAAGGGGGGGGAGG |
| | | | | ATCTGGCGGAGGCGGATCTGGGGGGGGAG |
| | | | | GAAGTGGGGGAGGGGGAAGCGGAGGGGG |
| | | | | AGGCTCAGGGGGGGGAGGATCCGATAAGA |
| | | | | CCCACACCTGTCCCCCTTGCCCTGCCCCTG |
| | | | | AACTGCTGGGAGGCCCTAGCGTGTTCCTGT |
| | | | | TCCCCCCAAAGCCCAAGGACACCCTGATGA |
| | | | | TCAGCCGGACCCCCGAAGTGACCTGCGTG |
| | | | | GTGGTGGATGTGTCCCACGAGGACCCTGAA |
| | | | | GTGAAGTTCAATTGGTACGTGGACGGCGTG |
| | | | | GAAGTGCACAACGCCAAGACCAAGCCCTGC |
| | | | | GAGGAACAGTACGGCAGCACCTACAGATGC |
| | | | | GTGTCCGTGCTGACCGTGCTGCACCAGGAC |
| | | | | TGGCTGAACGGCAAAGAGTACAAGTGCAAG |
| | | | | GTGTCCAACAAGGCCCTGCCTGCCCCCATC |
| | | | | GAGAAAACCATCAGCAAGGCCAAGGGCCAG |
| | | | | CCCCGCGAGCCTCAAGTGTATACCCTGCCC |
| | | | | CCCAGCCGGGAAGAGATGACCAAGAACCAG |
| | | | | GTGTCCCTGACCTGTCTCGTGAAGGGCTTC |
| | | | | TACCCCTCCGATATCGCCGTGGAATGGGAG |
| | | | | AGCAACGGCCAGCCCGAGAACAACTACAAG |
| | | | | ACCACCCCCCCTGTGCTGGACAGCGACGG |
| | | | | CTCATTCTTCCTGTACTCCAAGCTGACAGTG |
| | | | | GACAAGTCTAGATGGCAGCAGGGCAACGTG |
| | | | | TTCAGCTGCAGCGTGATGCACGAGGCCCTG |
| | | | | CACAACCACTACACCCAGAAGTCCCTGTCC |
| | | | | CTGAGCCCCGGCAAAGGTGGAGGCGGATC |
| | | | | TGGCGGTGGCGGGAGTGGAGGAGGAGGCA |
| | | | | GCCAGGTGCAGCTGATGGAATCTGGTGGCG |
| | | | | GAGTTGTGCAGCCTGGCAGATCCCTGAGAC |
| | | | | TGTCTTGTGCCGCCTCCGGCTTCACCTTCA |
| | | | | GCCGGTACTATATGCACTGGGTCCGACAGG |
| | | | | CCCCTGGCAAGTGTCCTGAATGGGTTGCCG |
| | | | | TGATCTGGCACGACGGCTCCAACAAGTACT |
| | | | | ACGCCGACTCCGTGAAGGGCAGATTCACCA |
| | | | | TCTCTCGGGACAACTCCAAGAACACCCTGT |
| | | | | ACCTGCAGATGAACTCCCTGAGAGCCGAGG |
| | | | | ACACCGCCGTGTACTACTGTGCTAGAGAGG |
| | | | | CCCCTTCTCTGGCCTATTGGGGACAGGGAA |
| | | | | CACTGGTCACAGTGTCCTCTGGCGGCGGAG |
| | | | | GATCTGGCGGAGGTGGTAGCGGAGGCGGT |
| | | | | GGATCTGAGATCGTGATGACCCAGTCTCCT |
| | | | | GGCACACTGTCTCTGAGCCCTGGCGAGAGA |
| | | | | GCTACCCTGTCTTGTAGAGCCTCTCAGTCC |
| | | | | GTGTCCTCCTCCTACCTGGCTTGGTATCAG |
| | | | | CAGAAGCCAGGCCAGGCTCCTCGGCTGTTG |
| | | | | ATCTACGGCGCTTCCTCTAGAGCCACAGGC |
| | | | | ATCCCTGACAGATTCTCCGGCTCTGGCTCT |
| | | | | GGCACCGACTTCACCCTGACCATCTCCAGA |
| | | | | CTGGAACCCGAGGACTTTGCTGTGTACTATT |
| | | | | GCCAGCAGTACGGCTCCTCCATCACCTTCG |
| | | | | GCTGTGGCACCAGGCTGGAAATCAAGTCTG |
| | | | | GAGGCGGAGGATCTGAAGTCCAGCTGGTTG |
| | | | | AAAGTGGTGGCGGATTGGTTCAGCCAGGCG |
| | | | | GCTCTCTGAAGCTGTCTTGTGCTGCCTCCG |
| | | | | GCTTCACCTTCAACAAATACGCCATGAATTG |
| | | | | GGTTCGACAAGCCCCAGGCAAAGGCATGGA |
| | | | | ATGGGTCGCCCGGATCAGATCCAAGTACAA |
| | | | | CAACTACGCTACCTACTACGCCGACGCCGT |
| | | | | GAAGGACCGGTTCACCATCTCCAGAGATGA |
| | | | | CTCCAAGAACACCCTGTACCTGCAGATGAA |
| | | | | CAACCTCAAGACCGAGGATACCGCCGTCTA |
| | | | | TTACTGTGTCAGAGCCGGCAACTTCGGCTC |
| | | | | CTCCTACATCTCCTACTTCGCCTACTGGGGC |
| | | | | CAGGGAACCCTTGTGACAGTCTCTAGTGGC |
| | | | | GGTGGTGGTAGTGGTGGTGGCGGCTCAGG |
| | | | | CGGTGGCGGATCTCAAACAGTGGTCACCCA |
| | | | | AGAGCCTAGCCTGACCGTTTCTCCTGGCGG |
| | | | | CACCGTGACCATCACATGCGGATCTTCTAC |
| | | | | CGGCGCTGTGACCTCCGGCAACTACCCCAA |
| | | | | TTGGATCCAGAAGAAGCCAGGCCAGGCTCC |
| | | | | TAGAGGACTGATCGGCGGCACAAAGTTTCT |
| | | | | GGCTCCCGGCACTCCCGCCAGATTTTCTGG |
| | | | | ATCTCTGGAAGGCGGCAAGGCTGCTCTGAC |
| | | | | ATTGTCTGGCGTCCAGCCAGAGGATGAGGC |
| | | | | CGAGTACTATTGCGTGCTGTACTACTCCAAC |
| | | | | AGATGGGTGTTCGGCTCCGGCACCAAGCTG |
| | | | | ACAGTCCTATGA |
| 1073. | MS 83-C2 CC x | artificial | Aa | QVQLVESGGGVVQPGRSLRLSCAASGFTFSS |
| | I2L x scFc x EP | | | YGMGWVRQAPGKCLEWVAVISYEASNKYYA |
| | 71-A5 CC x I2L | | | EAVKGRFTISRDNSKNTLYLQMNSLRAEDTAV |
| | (G4S)3 - | | | YYCAREGAHFGSGSYYPLYYYYAMDVWGQG |
| | COMBI#11 | | | TTVTVSSGGGGSGGGGSGGGGSEIVLTQSP |
| | (A8P) | | | GTLSLSPGERATLSCRASQSVSSSYLAWYQQ |
| | | | | KPGQAPRLLIYGASIRATGIPDRFSGSGSGTDF |
| | | | | TLTISRLEPEDFAVYYCQQYGSSPIFTFGCGTK |
| | | | | VEIKSGGGGSEVQLVESGGGLVQPGGSLKLS |
| | | | | CAASGFTFNKYAMNWVRQAPGKGMEWVARI |
| | | | | RSKYNNYATYYADAVKDRFTISRDDSKNTLYL |
| | | | | QMNNLKTEDTAVYYCVRAGNFGSSYISYFAY |
| | | | | WGQGTLVTVSSGGGGSGGGGSGGGGSQTV |
| | | | | VTQEPSLTVSPGGTVTITCGSSTGAVTSGNYP |
| | | | | NWIQKKPGQAPRGLIGGTKFLAPGTPARFSGS |
| | | | | LEGGKAALTLSGVQPEDEAEYYCVLYYSNRW |
| | | | | VFGSGTKLTVLGGGGSGGGGSGGGGSDKTH |
| | | | | TCPPCPAPELLGGPSVFLFPPKPKDTLMISRT |
| | | | | PEVTCVVVDVSHEDPEVKFNWYVDGVEVHNA |
| | | | | KTKPCEEQYGSTYRCVSVLTVLHQDWLNGKE |
| | | | | YKCKVSNKALPAPIEKTISKAKGQPREPQVYTL |
| | | | | PPSREEMTKNQVSLTCLVKGFYPSDIAVEWES |
| | | | | NGQPENNYKTTPPVLDSDGSFFLYSKLTVDKS |
| | | | | RWQQGNVFSCSVMHEALHNHYTQKSLSLSP |
| | | | | GKGGGGSGGGGSGGGGSGGGGSGGGGSG |
| | | | | GGGSDKTHTCPPCPAPELLGGPSVFLFPPKP |
| | | | | KDTLMISRTPEVTCVVVDVSHEDPEVKFNWYV |
| | | | | DGVEVHNAKTKPCEEQYGSTYRCVSVLTVLH |
| | | | | QDWLNGKEYKCKVSNKALPAPIEKTISKAKGQ |
| | | | | PREPQVYTLPPSREEMTKNQVSLTCLVKGFY |
| | | | | PSDIAVEWESNGQPENNYKTTPPVLDSDGSF |
| | | | | FLYSKLTVDKSRWQQGNVFSCSVMHEALHNH |
| | | | | YTQKSLSLSPGKGGGGSGGGGSGGGGSQV |
| | | | | QLMESGGGVVQPGRSLRLSCAASGFTFSRYY |
| | | | | MHWVRQAPGKCPEWVAVIWHDGSNKYYADS |
| | | | | VKGRFTISRDNSKNTLYLQMNSLRAEDTAVYY |
| | | | | CAREAPSLAYWGQGTLVTVSSGGGGSGGGG |
| | | | | SGGGGSEIVMTQSPGTLSLSPGERATLSCRA |
| | | | | SQSVSSSYLAWYQQKPGQAPRLLIYGASSRA |
| | | | | TGIPDRFSGSGSGTDFTLTISRLEPEDFAVYYC |
| | | | | QQYGSSITFGCGTRLEIKSGGGGSEVQLVES |
| | | | | GGGLVQPGGSLKLSCAASGFTFNKYAMNWV |
| | | | | RQAPGKGMEWVARIRSKYNNYATYYADAVKD |
| | | | | RFTISRDDSKNTLYLQMNNLKTEDTAVYYCVR |
| | | | | AGNFGSSYISYFAYWGQGTLVTVSSGGGGSG |
| | | | | GGGSGGGGSQTVVTQEPSLTVSPGGTVTITC |
| | | | | GSSTGAVTSGNYPNWIQKKPGQAPRGLIGGT |
| | | | | KFLAPGTPARFSGSLEGGKAALTLSGVQPED |
| | | | | EAEYYCVLYYSNRWVFGSGTKLTVL |
| 1074. | CL1 9-G4 CC | artificial | na | CAGGTGCAGCTGGTTCAGTCTGGCGCCGAA |
| | x6H10.09 x scFc | | | GTGAAGAAACCTGGCGCCTCTGTGAAGGTG |
| | xFL 4-E9 CC | | | TCCTGCAAGGCTTCTGGCTACACCTTTACCG |
| | x6H10.09 - | | | ACTACTACATGCACTGGGTCCGACAGGCCC |
| | Nucleotide | | | CTGGCCAGTGTTTGGAATGGATGGGCTGGA |
| | Sequence | | | TCAACCCCAACTCTGGCGGCCCTAATTACG |
| | | | | CCCAGAAATTCCAGGGCAGAGTGACCATGA |
| | | | | CCAGAGACACCTCCATCTCCACCGCTCACA |
| | | | | TGGAACTGTCCCGGCTGAGATCTGACGACA |
| | | | | CCGCCGTGTACTACTGCGCCAGAGAAAAGC |
| | | | | ACGCTGTGGCCGGCATCGGCTTCGATTATT |
| | | | | GGGGACAGGGCACCCTGGTCACCGTTTCTA |
| | | | | GCGGAGGCGGAGGATCTGGTGGTGGTGGA |
| | | | | TCTGGCGGCGGAGGCTCTGATATCCAGATG |
| | | | | ACCCAGTCTCCTTCCTCCGTGTCTGCCTCTG |
| | | | | TGGGCGACAGAGTGACAATCACCTGTCAGG |
| | | | | CCAGCCAGGACATCTCCAACTACCTGAACT |
| | | | | GGTATCAGCAGAAGCCCGGCAAGGCCCCTA |
| | | | | AGCTGCTGATCTACGCTGCCTCCTCTCTGG |
| | | | | AATCTGGCGTGCCCTCCAGATTCTCCGGCT |
| | | | | CTGGCTCTGGCACAGACTTTACCCTGACAAT |
| | | | | CTCCAGCCTGCAGCCTGAGGACTTCGCCAC |
| | | | | CTACTACTGTCAGCAGGCCAACAGCTTCCC |
| | | | | TCTGACCTTTGGCTGTGGCACCAAGGTGGA |
| | | | | CATCAAGTCTGGTGGCGGCGGTTCCGAAGT |
| | | | | CCAGCTGGTTGAAAGTGGTGGCGGATTGGT |
| | | | | TCAGCCAGGCGGCTCTCTGAAGCTGTCTTG |
| | | | | TGCTGCCTCCGGCTTCACCTTCAACAAATAC |
| | | | | GCCATGAATTGGGTTCGACAAGCCCCAGGC |
| | | | | AAAGGCATGGAATGGGTCGCCCGGATCAGA |
| | | | | TCCAAGTACAACAACTACGCTACCTACTACG |
| | | | | CCGACGCCGTGAAGGACCGGTTCACCATCT |
| | | | | CCAGAGATGACTCCAAGAACACCCTGTACC |
| | | | | TGCAGATGAACAACCTCAAGACCGAGGATA |
| | | | | CCGCCGTCTATTACTGTGTCAGAGCCGGCA |
| | | | | ACTTCGGCTCCTCCTACATCTCCTACTTCGC |
| | | | | CTACTGGGGCCAGGGAACCCTTGTGACAGT |
| | | | | CTCTAGTGGCGGTGGTGGTAGTGGTGGTGG |
| | | | | CGGCTCAGGCGGTGGCGGATCTCAAACAGT |
| | | | | GGTCACCCAAGAGCCTAGCCTGACCGTTTC |
| | | | | TCCTGGCGGCACCGTGACCATCACATGCGG |
| | | | | ATCTTCTACCGGCGCTGTGACCTCCGGCAA |
| | | | | CTACCCCAATTGGATCCAGAAGAAGCCAGG |
| | | | | CCAGGCTCCTAGAGGACTGATCGGCGGCAC |
| | | | | AAAGTTTCTGGCTCCCGGCACTCCCGCCAG |
| | | | | ATTTTCTGGATCTCTGGAAGGCGGCAAGGC |
| | | | | TGCTCTGACATTGTCTGGCGTCCAGCCAGA |
| | | | | GGATGAGGCCGAGTACTATTGCGTGCTGTA |
| | | | | CTACTCCAACAGATGGGTGTTCGGCTCCGG |
| | | | | CACCAAGCTGACAGTCCTAGGCGGCGGAG |
| | | | | GATCTGGCGGAGGTGGAAGCGGAGGCGGT |
| | | | | GGATCTGACAAGACCCACACATGTCCTCCA |
| | | | | TGTCCCGCCCCTGAACTGCTAGGCGGACCT |
| | | | | AGCGTGTTCCTGTTCCCCCCAAAGCCCAAG |
| | | | | GACACCCTGATGATCAGCCGTACGCCCGAA |
| | | | | GTGACCTGCGTGGTGGTGGATGTGTCCCAC |
| | | | | GAGGACCCTGAAGTGAAGTTCAATTGGTAC |
| | | | | GTGGACGGCGTGGAAGTGCACAACGCCAA |
| | | | | GACCAAGCCCTGCGAGGAACAGTACGGCA |
| | | | | GCACCTACAGATGCGTGTCCGTGCTGACCG |
| | | | | TGCTGCATCAGGACTGGCTGAACGGCAAAG |
| | | | | AGTACAAGTGCAAGGTGTCCAACAAGGCCC |
| | | | | TGCCTGCCCCCATCGAGAAAACCATCAGCA |
| | | | | AGGCCAAGGGCCAGCCCCGCGAGCCTCAA |
| | | | | GTGTATACCCTGCCCCCTAGCCGGGAAGAG |
| | | | | ATGACCAAGAACCAGGTGTCCCTGACCTGT |
| | | | | CTCGTGAAGGGCTTCTACCCCTCCGATATC |
| | | | | GCCGTGGAATGGGAGAGCAACGGCCAGCC |
| | | | | CGAGAACAACTACAAGACCACCCCCCCTGT |
| | | | | GCTGGACAGCGACGGCTCATTCTTCCTGTA |
| | | | | CTCCAAACTGACCGTGGACAAGAGCCGGTG |
| | | | | GCAGCAGGGCAACGTGTTCAGCTGCAGCGT |
| | | | | GATGCACGAGGCCCTGCACAACCACTACAC |
| | | | | CCAGAAGTCCCTGTCCCTGTCTCCCGGGAA |
| | | | | AGGCGGCGGAGGATCTGGCGGAGGCGGAT |
| | | | | CTGGGGGGGGAGGAAGTGGGGGAGGGGG |
| | | | | AAGCGGAGGGGGAGGCTCAGGGGGGGGA |
| | | | | GGATCCGATAAGACCCACACCTGTCCCCCT |
| | | | | TGCCCTGCCCCTGAACTGCTGGGAGGCCCT |
| | | | | AGCGTGTTCCTGTTCCCCCCAAAGCCCAAG |
| | | | | GACACCCTGATGATCAGCCGGACCCCCGAA |
| | | | | GTGACCTGCGTGGTGGTGGATGTGTCCCAC |
| | | | | GAGGACCCTGAAGTGAAGTTCAATTGGTAC |
| | | | | GTGGACGGCGTGGAAGTGCACAACGCCAA |
| | | | | GACCAAGCCCTGCGAGGAACAGTACGGCA |
| | | | | GCACCTACAGATGCGTGTCCGTGCTGACCG |
| | | | | TGCTGCACCAGGACTGGCTGAACGGCAAAG |
| | | | | AGTACAAGTGCAAGGTGTCCAACAAGGCCC |
| | | | | TGCCTGCCCCCATCGAGAAAACCATCAGCA |
| | | | | AGGCCAAGGGCCAGCCCCGCGAGCCTCAA |
| | | | | GTGTATACCCTGCCCCCCAGCCGGGAAGAG |
| | | | | ATGACCAAGAACCAGGTGTCCCTGACCTGT |
| | | | | CTCGTGAAGGGCTTCTACCCCTCCGATATC |
| | | | | GCCGTGGAATGGGAGAGCAACGGCCAGCC |
| | | | | CGAGAACAACTACAAGACCACCCCCCCTGT |
| | | | | GCTGGACAGCGACGGCTCATTCTTCCTGTA |
| | | | | CTCCAAGCTGACAGTGGACAAGTCTAGATG |
| | | | | GCAGCAGGGCAACGTGTTCAGCTGCAGCGT |
| | | | | GATGCACGAGGCCCTGCACAACCACTACAC |
| | | | | CCAGAAGTCCCTGTCCCTGAGCCCCGGCAA |
| | | | | AGGTGGAGGCGGATCTGGCGGTGGCGGGA |
| | | | | GTGGAGGAGGAGGCAGCCAGGTGACTCTG |
| | | | | AAAGAATCCGGTCCCACTCTCGTCAAGCCT |
| | | | | ACCGAAACTCTGACCCTGACGTGTACTGTC |
| | | | | AGTGGGTTTTCCTTCAGGAATGCACGAATG |
| | | | | GGTGTAAGCTGGATACGCCAACCACCTGGC |
| | | | | AAATGCCTGGAATGGCTCGCTCACATCTTCA |
| | | | | GCAATGACGAGAAGTCCTATTCTACCTCCCT |
| | | | | GAAATCCCGGTTGACCATTTCCAAGGATAC |
| | | | | GAGCAAGTCTCAGGTTGTGCTGACCATGAC |
| | | | | CAACATGGATCCCGTGGATACAGCCACCTA |
| | | | | CTTCTGTGCTCGTGTTCCCGAGTATAGCTCT |
| | | | | GGCTGGTATCGGTTTGACTACTGGGGACAG |
| | | | | GGCACATTGGTGACAGTATCTTCAGGAGGC |
| | | | | GGCGGGTCAGGTGGCGGAGGATCAGGCGG |
| | | | | TGGTGGTTCTGACATTCAGATGACTCAGAG |
| | | | | CCCATCAAGTCTGAGTGCCAGTGTTGGAGA |
| | | | | TAGAGTGACCATCAGTTGCAGAGCCTCTCA |
| | | | | GTCTATCAGGAGCTACCTTAACTGGTATCAG |
| | | | | CAGAAACCCGGCAAAGCTCCTAAGCTGCTG |
| | | | | ATCTACGCAACTAGCAGCCTTCAAGGAGGG |
| | | | | GTGCCATCCCGCTTTAGTGGGTCAGGATCT |
| | | | | GGCACTGACTTTACCCTCACAATCAGCTCCT |
| | | | | TGCAACCTGAGGACTTTGCCACCTACTACTG |
| | | | | CCAGCAGTCCTATTCCACACCCTTCACATTC |
| | | | | GGGTGTGGGACAAAGGTCGAGATTAAGTCC |
| | | | | GGAGGCGGAGGATCTGAAGTGCAGCTGGTT |
| | | | | GAATCTGGCGGCGGATTGGTTCAGCCTGGC |
| | | | | GGATCTCTGAAGCTGTCTTGTGCCGCCTCT |
| | | | | GGCTTCACCTTCAACAAATACGCCATGAACT |
| | | | | GGGTCCGACAGGCCCCTGGCAAAGGCATG |
| | | | | GAATGGGTCGCCCGGATCAGATCCAAGTAC |
| | | | | AACAACTACGCTACCTACTACGCCGACGCC |
| | | | | GTGAAGGACCGGTTCACCATCTCCAGAGAT |
| | | | | GACTCCAAGAACACCCTGTACCTGCAGATG |
| | | | | AACAACCTCAAGACCGAGGACACCGCCGTG |
| | | | | TACTACTGTGTCAGAGCCGGCAACTTCGGC |
| | | | | TCCTCCTACATCTCCTACTTCGCCTATTGGG |
| | | | | GCCAGGGCACCCTGGTCACAGTTAGTTCAG |
| | | | | GTGGCGGTGGATCAGGCGGCGGAGGTTCT |
| | | | | GGTGGCGGAGGCTCTCAAACAGTGGTCACC |
| | | | | CAAGAGCCTAGCCTGACCGTTTCTCCTGGC |
| | | | | GGCACCGTGACCATCACCTGTGGATCTTCT |
| | | | | ACCGGCGCTGTGACCTCCGGCAACTACCCC |
| | | | | AATTGGATCCAGAAGAAGCCCGGCCAGGCT |
| | | | | CCTAGAGGACTGATCGGAGGCACCAAGTTT |
| | | | | CTGGCTCCCGGCACTCCTGCCAGATTCTCC |
| | | | | GGTTCTCTGGAAGGCGGAAAGGCCGCTCTG |
| | | | | ACATTGTCTGGCGTGCAGCCTGAGGATGAG |
| | | | | GCTGAGTACTACTGCGTGCTGTACTACTCCA |
| | | | | ACAGATGGGTGTTCGGCTCCGGCACCAAGC |
| | | | | TGACAGTGCTT |
| 1075. | MS 15-B12 CC | artificial | Aa | QVQLQESGPGLVKPSETLSLTCTVSGGSISSS |
| | x4F10.03 I2M | | | SYFWGWIRQPPGKCLEWIGNIYYSGSSNYNP |
| | xscFc xCH3 15- | | | SLKSRVTISVDTSKNQFSLKLSSVTAADTAVYY |
| | E11 CC | | | CARLPRGDRDAFDIWGQGTMVTVSSGGGGS |
| | x4F10.03 I2M - | | | GGGGSGGGGSDIVMTQSPSSLSASVGDRVTI |
| | Full Sequence | | | TCRASQGISNYLAWYQQKPGKVPKLLIYAAST |
| | | | | LQSGVPSRFSGSGSGTDFTLTISSLQPEDFAT |
| | | | | YYCQQSYSTPFTFGCGTKVEIKSGGGGSEVQ |
| | | | | LVESGGGLVQPGGSLKLSCAASGFTFNKYAM |
| | | | | NWVRQAPGKGMEWVARIRSKYNNYATYYAD |
| | | | | AVKDRFTISRDDSKNTLYLQMNNLKTEDTAVY |
| | | | | YCVRAGNFGTSYISYWAYWGQGTLVTVSSGG |
| | | | | GGSGGGGSGGGGSQTVVTQEPSLTVSPGGT |
| | | | | VTITCGSSTGAVTSGNYPNWVQKKPGQAPRG |
| | | | | LIGGTKFLAPGTPARFSGSLSGGKAALTLSGV |
| | | | | QPEDEAEYYCVLWYSNRWVFGSGTKLTVLG |
| | | | | GGGSGGGGSGGGGSDKTHTCPPCPAPELLG |
| | | | | GPSVFLFPPKPKDTLMISRTPEVTCVVVDVSH |
| | | | | EDPEVKFNWYVDGVEVHNAKTKPCEEQYGST |
| | | | | YRCVSVLTVLHQDWLNGKEYKCKVSNKALPA |
| | | | | PIEKTISKAKGQPREPQVYTLPPSREEMTKNQ |
| | | | | VSLTCLVKGFYPSDIAVEWESNGQPENNYKTT |
| | | | | PPVLDSDGSFFLYSKLTVDKSRWQQGNVFSC |
| | | | | SVMHEALHNHYTQKSLSLSPGKGGGGSGGG |
| | | | | GSGGGGSGGGGSGGGGSGGGGSDKTHTCP |
| | | | | PCPAPELLGGPSVFLFPPKPKDTLMISRTPEV |
| | | | | TCVVVDVSHEDPEVKFNWYVDGVEVHNAKTK |
| | | | | PCEEQYGSTYRCVSVLTVLHQDWLNGKEYKC |
| | | | | KVSNKALPAPIEKTISKAKGQPREPQVYTLPPS |
| | | | | REEMTKNQVSLTCLVKGFYPSDIAVEWESNG |
| | | | | QPENNYKTTPPVLDSDGSFFLYSKLTVDKSR |
| | | | | WQQGNVFSCSVMHEALHNHYTQKSLSLSPG |
| | | | | KGGGGSGGGGSGGGGSQVQLVQSGAEVKK |
| | | | | PGASVKVSCKASGYTFTNYWMNWVRQAPGQ |
| | | | | CLEWMGNIAYGVKGTNYNQKFQGRVTMTVD |
| | | | | TSSSTAYMELSRLRSDDTAVYYCATRYFYVM |
| | | | | DYWGQGTLVTVSSGGGGSGGGGSGGGGSDI |
| | | | | QMTQSPSSLSASVGDRVTITCRASQDISNYLN |
| | | | | WYQQKPGKVPKLLIYYTSRLHSGVPSRFSGS |
| | | | | GSGTDFTLTISSLQPEDVATYYCVQYAQFPLT |
| | | | | FGCGTKVEIKSGGGGSEVQLVESGGGLVQPG |
| | | | | GSLKLSCAASGFTFNKYAMNWVRQAPGKGM |
| | | | | EWVARIRSKYNNYATYYADAVKDRFTISRDDS |
| | | | | KNTLYLQMNNLKTEDTAVYYCVRAGNFGTSYI |
| | | | | SYWAYWGQGTLVTVSSGGGGSGGGGSGGG |
| | | | | GSQTVVTQEPSLTVSPGGTVTITCGSSTGAVT |
| | | | | SGNYPNWVQKKPGQAPRGLIGGTKFLAPGTP |
| | | | | ARFSGSLSGGKAALTLSGVQPEDEAEYYCVL |
| | | | | WYSNRWVFGSGTKLTVL |
| 1076. | MS 15-B12 CC x | artificial | Aa | QVQLQESGPGLVKPSETLSLTCTVSGGSISSS |
| | I2L x scFc xCH3 | | | SYFWGWIRQPPGKCLEWIGNIYYSGSSNYNP |
| | 15-E11 CC x | | | SLKSRVTISVDTSKNQFSLKLSSVTAADTAVYY |
| | I2M2 - Full | | | CARLPRGDRDAFDIWGQGTMVTVSSGGGGS |
| | Sequence | | | GGGGSGGGGSDIVMTQSPSSLSASVGDRVTI |
| | | | | TCRASQGISNYLAWYQQKPGKVPKLLIYAAST |
| | | | | LQSGVPSRFSGSGSGTDFTLTISSLQPEDFAT |
| | | | | YYCQQSYSTPFTFGCGTKVEIKSGGGGSEVQ |
| | | | | LVESGGGLVQPGGSLKLSCAASGFTFNKYAM |
| | | | | NWVRQAPGKGMEWVARIRSKYNNYATYYAD |
| | | | | AVKDRFTISRDDSKNTLYLQMNNLKTEDTAVY |
| | | | | YCVRAGNFGSSYISYFAYWGQGTLVTVSSGG |
| | | | | GGSGGGGSGGGGSQTVVTQEPSLTVSPGGT |
| | | | | VTITCGSSTGAVTSGNYPNWIQKKPGQAPRG |
| | | | | LIGGTKFLAPGTPARFSGSLEGGKAALTLSGV |
| | | | | QPEDEAEYYCVLYYSNRWVFGSGTKLTVLGG |
| | | | | GGSGGGGSGGGGSDKTHTCPPCPAPELLGG |
| | | | | PSVFLFPPKPKDTLMISRTPEVTCVVVDVSHE |
| | | | | DPEVKFNWYVDGVEVHNAKTKPCEEQYGSTY |
| | | | | RCVSVLTVLHQDWLNGKEYKCKVSNKALPAPI |
| | | | | EKTISKAKGQPREPQVYTLPPSREEMTKNQV |
| | | | | SLTCLVKGFYPSDIAVEWESNGQPENNYKTTP |
| | | | | PVLDSDGSFFLYSKLTVDKSRWQQGNVFSCS |
| | | | | VMHEALHNHYTQKSLSLSPGKGGGGSGGGG |
| | | | | SGGGGSGGGGSGGGGSGGGGSDKTHTCPP |
| | | | | CPAPELLGGPSVFLFPPKPKDTLMISRTPEVT |
| | | | | CVVVDVSHEDPEVKFNWYVDGVEVHNAKTKP |
| | | | | CEEQYGSTYRCVSVLTVLHQDWLNGKEYKCK |
| | | | | VSNKALPAPIEKTISKAKGQPREPQVYTLPPSR |
| | | | | EEMTKNQVSLTCLVKGFYPSDIAVEWESNGQ |
| | | | | PENNYKTTPPVLDSDGSFFLYSKLTVDKSRW |
| | | | | QQGNVFSCSVMHEALHNHYTQKSLSLSPGKG |
| | | | | GGGSGGGGSGGGGSQVQLVQSGAEVKKPG |
| | | | | ASVKVSCKASGYTFTNYWMNWVRQAPGQCL |
| | | | | EWMGNIAYGVKGTNYNQKFQGRVTMTVDTS |
| | | | | SSTAYMELSRLRSDDTAVYYCATRYFYVMDY |
| | | | | WGQGTLVTVSSGGGGSGGGGSGGGGSDIQ |
| | | | | MTQSPSSLSASVGDRVTITCRASQDISNYLNW |
| | | | | YQQKPGKVPKLLIYYTSRLHSGVPSRFSGSGS |
| | | | | GTDFTLTISSLQPEDVATYYCVQYAQFPLTFG |
| | | | | CGTKVEIKSGGGGSEVQLVESGGGLVQPGGS |
| | | | | LKLSCAASGFTFNKYAINWVREAPGKGLEWV |
| | | | | ARIRSKYNNYATYYADAVKDRFTISRDDSKNT |
| | | | | AYLQMNNLKTEDTAVYYCVRNANFGTSYISYF |
| | | | | AYWGQGTLVTVSSGGGGSGGGGSGGGGSQ |
| | | | | TVVTQEPSLTVSPGGTVTLTCGSSTGAVTSGN |
| | | | | YPNWVQKKPGQAPRGLIGGTKFLAPGTPARF |
| | | | | SGSLLGGKAALTLSGVQPEDEAEYYCVLWYS |
| | | | | NRWVFGSGTKLTVL |
| 1077. | MS 15-B12 CC x | artificial | Aa | QVQLQESGPGLVKPSETLSLTCTVSGGSISSSSY |
| | I2C x scFc xCH3 | | | FWGWIRQPPGKCLEWIGNIYYSGSSNYNPSLKS |
| | 15-E11 CCx I2C0 - | | | RVTISVDTSKNQFSLKLSSVTAADTAVYYCAR |
| | Full Sequence | | | LPRGDRDAFDIWGQGTMVTVSSGGGGSGGGG |
| | | | | SGGGGSDIVMTQSPSSLSASVGDRVTITCRASQ |
| | | | | GISNYLAWYQQKPGKVPKLLIYAASTLQSGVP |
| | | | | SRFSGSGSGTDFTLTISSLQPEDFATYYCQQSYS |
| | | | | TPFTFGCGTKVEIKSGGGGSEVQLVESGGGLV |
| | | | | QPGGSLKLSCAASGFTFNKYAMNWVRQAPGK |
| | | | | GLEWVARIRSKYNNYATYYADSVKDRFTISRD |
| | | | | DSKNTAYLQMNNLKTEDTAVYYCVRHGNFGN |
| | | | | SYISYWAYWGQGTLVTVSSGGGGSGGGGSGG |
| | | | | GGSQTVVTQEPSLTVSPGGTVTLTCGSSTGAVT |
| | | | | SGNYPNWVQQKPGQAPRGLIGGTKFLAPGTPA |
| | | | | RFSGSLLGGKAALTLSGVQPEDEAEYYCVLWY |
| | | | | SNRWVFGGGTKLTVLGGGGSGGGGSGGGGSD |
| | | | | KTHTCPPCPAPELLGGPSVFLFPPKPKDTLMISR |
| | | | | TPEVTCVVVDVSHEDPEVKFNWYVDGVEVHN |
| | | | | AKTKPCEEQYGSTYRCVSVLTVLHQDWLNGK |
| | | | | EYKCKVSNKALPAPIEKTISKAKGQPREPQVYT |
| | | | | LPPSREEMTKNQVSLTCLVKGFYPSDIAVEWES |
| | | | | NGQPENNYKTTPPVLDSDGSFFLYSKLTVDKS |
| | | | | RWQQGNVFSCSVMHEALHNHYTQKSLSLSPG |
| | | | | KGGGGSGGGGSGGGGSGGGGSGGGGSGGGGS |
| | | | | DKTHTCPPCPAPELLGGPSVFLFPPKPKDTLMIS |
| | | | | RTPEVTCVVVDVSHEDPEVKFNWYVDGVEVH |
| | | | | NAKTKPCEEQYGSTYRCVSVLTVLHQDWLNG |
| | | | | KEYKCKVSNKALPAPIEKTISKAKGQPREPQVY |
| | | | | TLPPSREEMTKNQVSLTCLVKGFYPSDIAVEWE |
| | | | | SNGQPENNYKTTPPVLDSDGSFFLYSKLTVDKS |
| | | | | RWQQGNVFSCSVMHEALHNHYTQKSLSLSPG |
| | | | | KGGGGSGGGGSGGGGSQVQLVQSGAEVKKPG |
| | | | | ASVKVSCKASGYTFTNYWMNWVRQAPGQCL |
| | | | | EWMGNIAYGVKGTNYNQKFQGRVTMTVDTSS |
| | | | | STAYMELSRLRSDDTAVYYCATRYFYVMDYW |
| | | | | GQGTLVTVSSGGGGSGGGGSGGGGSDIQMTQS |
| | | | | PSSLSASVGDRVTITCRASQDISNYLNWYQQKP |
| | | | | GKVPKLLIYYTSRLHSGVPSRFSGSGSGTDFTL |
| | | | | TISSLQPEDVATYYCVQYAQFPLTFGCGTKVEI |
| | | | | KSGGGGSEVQLVESGGGLVQPGGSLKLSCAAS |
| | | | | GFTFNKYAMNWVRQAPGKGLEWVARIRSKYN |
| | | | | NYATYYADSVKDRFTISRDDSKNTAYLQMNN |
| | | | | LKTEDTAVYYCVRHGNFGNSYISYWAYWGQG |
| | | | | TLVTVSSGGGGSGGGGSGGGGSQTVVTQEPSL |
| | | | | TVSPGGTVTLTCGSSTGAVTSGNYPNWVQQKP |
| | | | | GQAPRGLIGGTKFLAPGTPARFSGSLLGGKAAL |
| | | | | TLSGVQPEDEAEYYCVLWYSNRWVFGGGTKL |
| | | | | TVL |
| 1078. | MS 15-B12 CC x | artificial | Aa | QVQLQESGPGLVKPSETLSLTCTVSGGSISSSSY |
| | I2L x scFc x CH3 | | | FWGWIRQPPGKCLEWIGNIYYSGSSNYNPSLKS |
| | 15-E11 CC x I2L - | | | RVTISVDTSKNQFSLKLSSVTAADTAVYYCAR |
| | Full Sequence | | | LPRGDRDAFDIWGQGTMVTVSSGGGGSGGGG |
| | | | | SGGGGSDIVMTQSPSSLSASVGDRVTITCRASQ |
| | | | | GISNYLAWYQQKPGKVPKLLIYAASTLQSGVP |
| | | | | SRFSGSGSGTDFTLTISSLQPEDFATYYCQQSYS |
| | | | | TPFTFGCGTKVEIKSGGGGSEVQLVESGGGLV |
| | | | | QPGGSLKLSCAASGFTFNKYAMNWVRQAPGK |
| | | | | GMEWVARIRSKYNNYATYYADAVKDRFTISR |
| | | | | DDSKNTLYLQMNNLKTEDTAVYYCVRAGNFG |
| | | | | SSYISYFAYWGQGTLVTVSSGGGGSGGGGSGG |
| | | | | GGSQTVVTQEPSLTVSPGGTVTITCGSSTGAVT |
| | | | | SGNYPNWIQKKPGQAPRGLIGGTKFLAPGTPA |
| | | | | RFSGSLEGGKAALTLSGVQPEDEAEYYCVLYY |
| | | | | SNRWVFGSGTKLTVLGGGGSGGGGSGGGGSD |
| | | | | KTHTCPPCPAPELLGGPSVFLFPPKPKDTLMISR |
| | | | | TPEVTCVVVDVSHEDPEVKFNWYVDGVEVHN |
| | | | | AKTKPCEEQYGSTYRCVSVLTVLHQDWLNGK |
| | | | | EYKCKVSNKALPAPIEKTISKAKGQPREPQVYT |
| | | | | LPPSREEMTKNQVSLTCLVKGFYPSDIAVEWES |
| | | | | NGQPENNYKTTPPVLDSDGSFFLYSKLTVDKS |
| | | | | RWQQGNVFSCSVMHEALHNHYTQKSLSLSPG |
| | | | | KGGGGSGGGGSGGGGSGGGGSGGGGSGGGGS |
| | | | | DKTHTCPPCPAPELLGGPSVFLFPPKPKDTLMIS |
| | | | | RTPEVTCVVVDVSHEDPEVKFNWYVDGVEVH |
| | | | | NAKTKPCEEQYGSTYRCVSVLTVLHQDWLNG |
| | | | | KEYKCKVSNKALPAPIEKTISKAKGQPREPQVY |
| | | | | TLPPSREEMTKNQVSLTCLVKGFYPSDIAVEWE |
| | | | | SNGQPENNYKTTPPVLDSDGSFFLYSKLTVDKS |
| | | | | RWQQGNVFSCSVMHEALHNHYTQKSLSLSPG |
| | | | | KGGGGSGGGGSGGGGSQVQLVQSGAEVKKPG |
| | | | | ASVKVSCKASGYTFTNYWMNWVRQAPGQCL |
| | | | | EWMGNIAYGVKGTNYNQKFQGRVTMTVDTSS |
| | | | | STAYMELSRLRSDDTAVYYCATRYFYVMDYW |
| | | | | GQGTLVTVSSGGGGSGGGGSGGGGSDIQMTQS |
| | | | | PSSLSASVGDRVTITCRASQDISNYLNWYQQKP |
| | | | | GKVPKLLIYYTSRLHSGVPSRFSGSGSGTDFTL |
| | | | | TISSLQPEDVATYYCVQYAQFPLTFGCGTKVEI |
| | | | | KSGGGGSEVQLVESGGGLVQPGGSLKLSCAAS |
| | | | | GFTFNKYAMNWVRQAPGKGMEWVARIRSKY |
| | | | | NNYATYYADAVKDRFTISRDDSKNTLYLQMN |
| | | | | NLKTEDTAVYYCVRAGNFGSSYISYFAYWGQ |
| | | | | GTLVTVSSGGGGSGGGGSGGGGSQTVVTQEPS |
| | | | | LTVSPGGTVTITCGSSTGAVTSGNYPNWIQKKP |
| | | | | GQAPRGLIGGTKFLAPGTPARFSGSLEGGKAAL |
| | | | | TLSGVQPEDEAEYYCVLYYSNRWVFGSGTKLT |
| | | | | VL |
| 1079. | MS 15-B12 CC x | artificial | Aa | QVQLQESGPGLVKPSETLSLTCTVSGGSISSSSY |
| | I2M2 x scFc x | | | FWGWIRQPPGKCLEWIGNIYYSGSSNYNPSLKS |
| | CH3 15-E11 CC x | | | RVTISVDTSKNQFSLKLSSVTAADTAVYYCAR |
| | I2M2 - Full | | | LPRGDRDAFDIWGQGTMVTVSSGGGGSGGGG |
| | Sequence | | | SGGGGSDIVMTQSPSSLSASVGDRVTITCRASQ |
| | | | | GISNYLAWYQQKPGKVPKLLIYAASTLQSGVP |
| | | | | SRFSGSGSGTDFTLTISSLQPEDFATYYCQQSYS |
| | | | | TPFTFGCGTKVEIKSGGGGSEVQLVESGGGLV |
| | | | | QPGGSLKLSCAASGFTFNKYAINWVREAPGKG |
| | | | | LEWVARIRSKYNNYATYYADAVKDRFTISRDD |
| | | | | SKNTAYLQMNNLKTEDTAVYYCVRNANFGTS |
| | | | | YISYFAYWGQGTLVTVSSGGGGSGGGGSGGG |
| | | | | GSQTVVTQEPSLTVSPGGTVTLTCGSSTGAVTS |
| | | | | GNYPNWVQKKPGQAPRGLIGGTKFLAPGTPAR |
| | | | | FSGSLLGGKAALTLSGVQPEDEAEYYCVLWYS |
| | | | | NRWVFGSGTKLTVLGGGGSGGGGSGGGGSDK |
| | | | | THTCPPCPAPELLGGPSVFLFPPKPKDTLMISRT |
| | | | | PEVTCVVVDVSHEDPEVKFNWYVDGVEVHNA |
| | | | | KTKPCEEQYGSTYRCVSVLTVLHQDWLNGKE |
| | | | | YKCKVSNKALPAPIEKTISKAKGQPREPQVYTL |
| | | | | PPSREEMTKNQVSLTCLVKGFYPSDIAVEWES |
| | | | | NGQPENNYKTTPPVLDSDGSFFLYSKLTVDKS |
| | | | | RWQQGNVFSCSVMHEALHNHYTQKSLSLSPG |
| | | | | KGGGGSGGGGSGGGGSGGGGSGGGGSGGGGS |
| | | | | DKTHTCPPCPAPELLGGPSVFLFPPKPKDTLMIS |
| | | | | RTPEVTCVVVDVSHEDPEVKFNWYVDGVEVH |
| | | | | NAKTKPCEEQYGSTYRCVSVLTVLHQDWLNG |
| | | | | KEYKCKVSNKALPAPIEKTISKAKGQPREPQVY |
| | | | | TLPPSREEMTKNQVSLTCLVKGFYPSDIAVEWE |
| | | | | SNGQPENNYKTTPPVLDSDGSFFLYSKLTVDKS |
| | | | | RWQQGNVFSCSVMHEALHNHYTQKSLSLSPG |
| | | | | KGGGGSGGGGSGGGGSQVQLVQSGAEVKKPG |
| | | | | ASVKVSCKASGYTFTNYWMNWVRQAPGQCL |
| | | | | EWMGNIAYGVKGTNYNQKFQGRVTMTVDTSS |
| | | | | STAYMELSRLRSDDTAVYYCATRYFYVMDYW |
| | | | | GQGTLVTVSSGGGGSGGGGSGGGGSDIQMTQS |
| | | | | PSSLSASVGDRVTITCRASQDISNYLNWYQQKP |
| | | | | GKVPKLLIYYTSRLHSGVPSRFSGSGSGTDFTL |
| | | | | TISSLQPEDVATYYCVQYAQFPLTFGCGTKVEI |
| | | | | KSGGGGSEVQLVESGGGLVQPGGSLKLSCAAS |
| | | | | GFTFNKYAINWVREAPGKGLEWVARIRSKYN |
| | | | | NYATYYADAVKDRFTISRDDSKNTAYLQMNN |
| | | | | LKTEDTAVYYCVRNANFGTSYISYFAYWGQG |
| | | | | TLVTVSSGGGGSGGGGSGGGGSQTVVTQEPSL |
| | | | | TVSPGGTVTLTCGSSTGAVTSGNYPNWVQKKP |
| | | | | GQAPRGLIGGTKFLAPGTPARFSGSLLGGKAAL |
| | | | | TLSGVQPEDEAEYYCVLWYSNRWVFGSGTKL |
| | | | | TVL |
| 1080. | MS 15-B12 CC x | artificial | Aa | QVQLQESGPGLVKPSETLSLTCTVSGGSISSSSY |
| | I2M2 x scFc x | | | FWGWIRQPPGKCLEWIGNIYYSGSSNYNPSLKS |
| | CH3 15-E11 x I2L - | | | RVTISVDTSKNQFSLKLSSVTAADTAVYYCAR |
| | Full Sequence | | | LPRGDRDAFDIWGQGTMVTVSSGGGGSGGGG |
| | | | | SGGGGSDIVMTQSPSSLSASVGDRVTITCRASQ |
| | | | | GISNYLAWYQQKPGKVPKLLIYAASTLQSGVP |
| | | | | SRFSGSGSGTDFTLTISSLQPEDFATYYCQQSYS |
| | | | | TPFTFGCGTKVEIKSGGGGSEVQLVESGGGLV |
| | | | | QPGGSLKLSCAASGFTFNKYAINWVREAPGKG |
| | | | | LEWVARIRSKYNNYATYYADAVKDRFTISRDD |
| | | | | SKNTAYLQMNNLKTEDTAVYYCVRNANFGTS |
| | | | | YISYFAYWGQGTLVTVSSGGGGSGGGGSGGG |
| | | | | GSQTVVTQEPSLTVSPGGTVTLTCGSSTGAVTS |
| | | | | GNYPNWVQKKPGQAPRGLIGGTKFLAPGTPAR |
| | | | | FSGSLLGGKAALTLSGVQPEDEAEYYCVLWYS |
| | | | | NRWVFGSGTKLTVLGGGGSGGGGSGGGGSDK |
| | | | | THTCPPCPAPELLGGPSVFLFPPKPKDTLMISRT |
| | | | | PEVTCVVVDVSHEDPEVKFNWYVDGVEVHNA |
| | | | | KTKPCEEQYGSTYRCVSVLTVLHQDWLNGKE |
| | | | | YKCKVSNKALPAPIEKTISKAKGQPREPQVYTL |
| | | | | PPSREEMTKNQVSLTCLVKGFYPSDIAVEWES |
| | | | | NGQPENNYKTTPPVLDSDGSFFLYSKLTVDKS |
| | | | | RWQQGNVFSCSVMHEALHNHYTQKSLSLSPG |
| | | | | KGGGGSGGGGSGGGGSGGGGSGGGGSGGGGS |
| | | | | DKTHTCPPCPAPELLGGPSVFLFPPKPKDTLMIS |
| | | | | RTPEVTCVVVDVSHEDPEVKFNWYVDGVEVH |
| | | | | NAKTKPCEEQYGSTYRCVSVLTVLHQDWLNG |
| | | | | KEYKCKVSNKALPAPIEKTISKAKGQPREPQVY |
| | | | | TLPPSREEMTKNQVSLTCLVKGFYPSDIAVEWE |
| | | | | SNGQPENNYKTTPPVLDSDGSFFLYSKLTVDKS |
| | | | | RWQQGNVFSCSVMHEALHNHYTQKSLSLSPG |
| | | | | KGGGGSGGGGSGGGGSQVQLVQSGAEVKKPG |
| | | | | ASVKVSCKASGYTFTNYWMNWVRQAPGQCL |
| | | | | EWMGNIAYGVKGTNYNQKFQGRVTMTVDTSS |
| | | | | STAYMELSRLRSDDTAVYYCATRYFYVMDYW |
| | | | | GQGTLVTVSSGGGGSGGGGSGGGGSDIQMTQS |
| | | | | PSSLSASVGDRVTITCRASQDISNYLNWYQQKP |
| | | | | GKVPKLLIYYTSRLHSGVPSRFSGSGSGTDFTL |
| | | | | TISSLQPEDVATYYCVQYAQFPLTFGCGTKVEI |
| | | | | KSGGGGSEVQLVESGGGLVQPGGSLKLSCAAS |
| | | | | GFTFNKYAMNWVRQAPGKGMEWVARIRSKY |
| | | | | NNYATYYADAVKDRFTISRDDSKNTLYLQMN |
| | | | | NLKTEDTAVYYCVRAGNFGSSYISYFAYWGQ |
| | | | | GTLVTVSSGGGGSGGGGSGGGGSQTVVTQEPS |
| | | | | LTVSPGGTVTITCGSSTGAVTSGNYPNWIQKKP |
| | | | | GQAPRGLIGGTKFLAPGTPARFSGSLEGGKAAL |
| | | | | TLSGVQPEDEAEYYCVLYYSNRWVFGSGTKLT |
| | | | | VL |
| 1081. | Ubiquitin | artificial | Aa | MQIFVKTLTGKTITLEVEPSDTIENVKAKIQDKE |
| | | | | GIPPDQQRLIFAGKQLEDGRTLSDYNIQKESTL |
| | | | | HLVLRLRGG |
| 1082. | HSP70-1 | artificial | Aa | AAAIGIDLGTTYSCVGVFQHGKVEIIANDQGNR |
| | | | | TTPSYVAFTDTERLIGDAAKNQVALNPQNTVF |
| | | | | DAKRLIGRKFGDPVVQSDMKHWPFQVINDGD |
| | | | | KPKVQVSYKGETKAFYPEEISSMVLTKMKEIA |
| | | | | EAYLGYPVTNAVITVPAYFNDSQRQATKDAGV |
| | | | | IAGLNVLRIINEPTAAAIAYGLDRTGKGERNVLI |
| | | | | FDLGGGTFDVSILTIDDGIFEVKATAGDTHLGG |
| | | | | EDFDNRLVNHFVEEFKRKHKKDISQNKRAVRR |
| | | | | LRTACERAKRTLSSSTQASLEIDSLFEGIDFYTSI |
| | | | | TRARFEELCSDLFRSTLEPVEKALRDAKLDKA |
| | | | | QIHDLVLVGGSTRIPKVQKLLQDFFNGRDLNKS |
| | | | | INPDEAVAYGAAVQAAILM |
| 1083. | beta 2 | artificial | Aa | MIQRTPKIQVYSRHPAENGKSNFLNCYVSGFHP |
| | microglobulin | | | SDIEVDLLKNGERIEKVEHSDLSFSKDWSFYLL |
| | | | | YYTEFTPTEKDEYACRVNHVTLSQPKIVKWD |
| 1084. | SAND domain | artificial | Aa | DMEIAYPITCGESKAILLWKKFVCPGINVKCVK |
| | | | | FNDQLISPKHFVHLAGKSTLKDWKRAIRLGGI |
| | | | | MLRKMMDSGQIDFYQHDKVCSNTCR |
| 1085. | Green fluorescent | artificial | Aa | MSKGEELFTGVVPILVELDGDVNGHKFSVSGE |
| | protein (GFP) | | | GEGDATYGKLTLKFICTTGKLPVPWPTLVTTFT |
| | | | | YGVQCFSRYPDHMKRHDFFKSAMPEGYVQER |
| | | | | TIFFKDDGNYKTRAEVKFEGDTLVNRIELKGID |
| | | | | FKEDGNILGHKLEYNYNSHNVYIMADKQKNGI |
| | | | | KVNFKIRHNIEDGSVQLADHYQQNTPIGDGPV |
| | | | | LLPDNHYLSTQSALSKDPNEKRDHMVLLEFVT |
| | | | | AAGITHGMDELYK |
| 1086. | VHH antibody | artificial | Aa | QVQLQESGGGLVQAGDSLKLSCEASGDSIGTY |
| | lama domain | | | VIGWFRQAPGKERIYLATIGRNLVGPSDFYTRY |
| | | | | ADSVKGRFAVSRDNAKNTVNLQMNSLKPEDT |
| | | | | AVYYCAAKTTTWGGNDPNNWNYWGQGTQV |
| | | | | TVSS |
| 1087. | PSI domain from | artificial | Aa | GSAMGCRHFQSCSQCLSAPPFVQCGWCHDKC |
| | Met-receptor | | | VRSEECLSGTWTQQICL |
| 1088. | Fibronectin type | artificial | Aa | RLDAPSQIEVKDVTDTTALITWFKPLAEIDGIEL |
| | III domain from | | | TYGIKDVPGDRTTIDLTEDENQYSIGNLKPDTE |
| | tenascin | | | YEVSLISRRGDMSSNPAKETFTT |
| 1089. | Granulocyte- | artificial | Aa | APARSPSPSTQPWEHVNAIQEARRLLNLSRDTA |
| | macrophage | | | AEMNETVEVISEMFDLQEPTCLQTRLELYKQG |
| | colony-stimulating | | | LRGSLTKLKGPLTMMASHYKQHCPPTPETSCA |
| | factor (GM-CSF) | | | TQIITFESFKENLKDFLLVIPFDCWEPVQE |
| 1090. | Interleukin-4 | artificial | Aa | HKCDITLQEIIKTLNSLTEQKTLCTELTVTDIFA |
| | | | | ASKNTTEKETFCRAATVLRQFYSHHEKDTRCL |
| | | | | GATAQQFHRHKQLIRFLKRLDRNLWGLAGLNS |
| | | | | CPVKEANQSTLENFLERLKTIMREKYSKCSS |
| 1091. | CD137L | artificial | Aa | DPAGLLDLRQGMFAQLVAQNVLLIDGPLSWYS |
| | Ectodomain | | | DPGLAGVSLTGGLSYKEDTKELVVAKAGVYY |
| | | | | VFFQMELRRVVAGEGSGSVSLALHLMPLRSAA |
| | | | | GAAALALTVDLPPASSEARNSAFGFQGRLLHL |
| | | | | SAGQRLGVHLHTEARARHAWQLTQGATVLGL |
| | | | | FRVTPEIPA |
| 1092. | Interleukin-2 | artificial | Aa | APTSSSTKKTQLQLEHLLLDLQMILNGINNYKN |
| | | | | PKLTRMLTFKFYMPKKATELKHLQCLEEELKP |
| | | | | LEEVLNLAQSKNFHLRPRDLISNINVIVLELKGS |
| | | | | ETTFMCEYADETATIVEFLNRWITFAQSIISTLT |
| 1093. | PD-1 binding | artificial | Aa | AFTVTVPKDLYVVEYGSNMTIECKFPVEKELD |
| | domain from | | | LAALIVYWEMEDKNIIQFVHGEEDLKVQHSSY |
| | human | | | RQRARLLKDQLSLGNAALQITDVKLQDAGVY |
| | Programmed cell | | | RCMISYGGADYKRITVKVNAPYAAALEHHHH |
| | death 1 ligand 1 | | | |
| | (PDL1) | | | |
| 1094. | Tim-3 (AS 24- | artificial | Aa | SEYRAEVGQNAYLPCFYTPAAPGNLVPVCWG |
| | 130) | | | KGACPVFECGNVVLRTDERDVNYWTSRYWLN |
| | | | | GDFRKGDVSLTIENVTLADSGIYCCRIQIPGIMN |
| | | | | DEKFNLKLVIK |
| 1095. | MiniSOG | artificial | Aa | MEKSFVITDPRLPDNPIIFASDGFLELTEYSREEI |
| | | | | LGRNGRFLQGPETDQATVQKIRDAIRDQREITV |
| | | | | QLINYTKSGKKFWNLLHLQPMRDQKGELQYFI |
| | | | | GVQLDGEFIPNPLLG |
| 1096. | A(EAAAK)4ALE | artificial | Aa | AEAAAKEAAAKEAAAKEAAAKALEAEAAAK |
| | A(EAAAK)4A | | | EAAAKEAAAKEAAAKA |
| 1097. | (PA)25P | artificial | Aa | PAPAPAPAPAPAPAPAPAPAPAPAPAPAPAPAP |
| | | | | APAPAPAPAPAPAPAPAP |
| 1098. | SpyCatcher | artificial | Aa | VTTLSGLSGEQGPSGDMTTEEDSATHIKFSKRD |
| | | | | EDGRELAGATMELRDSSGKTISTWISDGHVKD |
| | | | | FYLYPGKYTFVETAAPDGYEVATAITFTVNEQ |
| | | | | GQVTVNGEATKGDAHT |
| 1099. | SpyTag | artificial | Aa | VPTIVMVDAYKRYK |
| 1100. | DogTag | artificial | Aa | DIPATYEFTDGKHYITNEPIPPK |
| 1101. | SnoopTagJr | artificial | Aa | KLGSIEFIKVNK |
| 1102. | MS 15-B12 CC x | artificial | Aa | QVQLQESGPGLVKPSETLSLTCTVSGGSISSSSY |
| | G4S3x heFc(A) x | | | FWGWIRQPPGKCLEWIGNIYYSGSSNYNPSLKS |
| | G4S3 x CH3 15- | | | RVTISVDTSKNQFSLKLSSVTAADTAVYYCAR |
| | E11 CC | | | LPRGDRDAFDIWGQGTMVTVSSGGGGSGGGG |
| | | | | SGGGGSDIVMTQSPSSLSASVGDRVTITCRASQ |
| | | | | GISNYLAWYQQKPGKVPKLLIYAASTLQSGVP |
| | | | | SRFSGSGSGTDFTLTISSLQPEDFATYYCQQSYS |
| | | | | TPFTFGCGTKVEIKSGGGGSGGGGSGGGGSDK |
| | | | | THTCPPCPAPELLGGPSVFLFPPKPKDTLMISRT |
| | | | | PEVTCVVVDVSHEDPEVKFNWYVDGVEVHNA |
| | | | | KTKPCEEQYGSTYRCVSVLTVLHQDWLNGKE |
| | | | | YKCKVSNKALPAPIEKTISKAKGQPREPQVYTL |
| | | | | PPSREEMTKNQVSLTCLVKGFYPSDIAVEWES |
| | | | | NGQPENNYDTTPPVLDSDGSFFLYSDLTVDKS |
| | | | | RWQQGNVFSCSVMHEALHNHYTQDSLSLSPG |
| | | | | KGGGGSGGGGSGGGGSQVQLVQSGAEVKKPG |
| | | | | ASVKVSCKASGYTFTNYWMNWVRQAPGQCL |
| | | | | EWMGNIAYGVKGTNYNQKFQGRVTMTVDTSS |
| | | | | STAYMELSRLRSDDTAVYYCATRYFYVMDYW |
| | | | | GQGTLVTVSSGGGGSGGGGSGGGGSDIQMTQS |
| | | | | PSSLSASVGDRVTITCRASQDISNYLNWYQQKP |
| | | | | GKVPKLLIYYTSRLHSGVPSRFSGSGSGTDFTL |
| | | | | TISSLQPEDVATYYCVQYAQFPLTFGCGTKVEI |
| | | | | K |
| 1103. | 6H10-09 x G4S3 x | artificial | Aa | EVQLVESGGGLVQPGGSLKLSCAASGFTFNKY |
| | heFc(B) x GS3 x | | | AMNWVRQAPGKGMEWVARIRSKYNNYATYY |
| | 6H10.09 | | | ADAVKDRFTISRDDSKNTLYLQMNNLKTEDTA |
| | | | | VYYCVRAGNFGSSYISYFAYWGQGTLVTVSSG |
| | | | | GGGSGGGGSGGGGSQTVVTQEPSLTVSPGGTV |
| | | | | TITCGSSTGAVTSGNYPNWIQKKPGQAPRGLIG |
| | | | | GTKFLAPGTPARFSGSLEGGKAALTLSGVQPED |
| | | | | EAEYYCVLYYSNRWVFGSGTKLTVLGGGGSG |
| | | | | GGGSGGGGSDKTHTCPPCPAPELLGGPSVFLFP |
| | | | | PKPKDTLMISRTPEVTCVVVDVSHEDPEVKEN |
| | | | | WYVDGVEVHNAKTKPCEEQYGSTYRCVSVLT |
| | | | | VLHQDWLNGKEYKCKVSNKALPAPIEKTISKA |
| | | | | KGQPREPQVYTLPPSRKEMTKNQVSLTCLVKG |
| | | | | FYPSDIAVEWESNGQPENNYKTTPPVLKSDGSF |
| | | | | FLYSKLTVDKSRWQQGNVFSCSVMHEALHNH |
| | | | | YTQKSLSLSPGKGGGGSGGGGSGGGGSEVQLV |
| | | | | ESGGGLVQPGGSLKLSCAASGFTFNKYAMNW |
| | | | | VRQAPGKGMEWVARIRSKYNNYATYYADAV |
| | | | | KDRFTISRDDSKNTLYLQMNNLKTEDTAVYYC |
| | | | | VRAGNFGSSYISYFAYWGQGTLVTVSSGGGGS |
| | | | | GGGGSGGGGSQTVVTQEPSLTVSPGGTVTITC |
| | | | | GSSTGAVTSGNYPNWIQKKPGQAPRGLIGGTK |
| | | | | FLAPGTPARFSGSLEGGKAALTLSGVQPEDEAE |
| | | | | YYCVLYYSNRWVFGSGTKLTVL |
| 1104. | CL1 9-G4 scFab8 | artificial | Aa | QVQLVQSGAEVKKPGASVKVSCKASGYTFTD |
| | x G4S × I2Ccc x | | | YYMHWVRQAPGQGLEWMGWINPNSGGPNYA |
| | G4 x scFc x G4 x | | | QKFQGRVTMTRDTSISTAHMELSRLRSDDTAV |
| | FL 4-E9 scFab8 | | | YYCAREKHAVAGIGFDYWGQGTLVTVSSAST |
| | xG4S xI2Ccc - | | | KGPSVFPLAPSSKSTSGGTAALGCLVKDYFPEP |
| | Full Sequence | | | VTVSWNSGALTSGVHTFPAVLQSSGLYSLSSV |
| | | | | VTVPSSSLGTQTYICNVNHKPSNTKVDKKVEP |
| | | | | KSCGGGGSGGGGSGGGGSGGGGSGGGGSGGG |
| | | | | GSGGGGSGGGGSDIQMTQSPSSVSASVGDRVTI |
| | | | | TCQASQDISNYLNWYQQKPGKAPKLLIYAASS |
| | | | | LESGVPSRFSGSGSGTDFTLTISSLQPEDFATYY |
| | | | | CQQANSFPLTFGPGTKVDIKRTVAAPSVFIFPPS |
| | | | | DEQLKSGTASVVCLLNNFYPREAKVQWKVDN |
| | | | | ALQSGNSQESVTEQDSKDSTYSLSSTLTLSKAD |
| | | | | YEKHKVYACEVTHQGLSSPVTKSFNRGECSGG |
| | | | | GGSEVQLVESGGGLVQPGGSLKLSCAASGFTF |
| | | | | NKYAMNWVRQAPGKCLEWVARIRSKYNNYA |
| | | | | TYYADSVKDRFTISRDDSKNTAYLQMNNLKTE |
| | | | | DTAVYYCVRHGNFGNSYISYWAYWGQGTLVT |
| | | | | VSSGGGGSGGGGSGGGGSQTVVTQEPSLTVSP |
| | | | | GGTVTLTCGSSTGAVTSGNYPNWVQQKPGQA |
| | | | | PRGLIGGTKFLAPGTPARFSGSLLGGKAALTLS |
| | | | | GVQPEDEAEYYCVLWYSNRWVFGCGTKLTVL |
| | | | | GGGGDKTHTCPPCPAPELLGGPSVFLFPPKPKD |
| | | | | TLMISRTPEVTCVVVDVSHEDPEVKFNWYVDG |
| | | | | VEVHNAKTKPCEEQYGSTYRCVSVLTVLHQD |
| | | | | WLNGKEYKCKVSNKALPAPIEKTISKAKGQPR |
| | | | | EPQVYTLPPSREEMTKNQVSLTCLVKGFYPSDI |
| | | | | AVEWESNGQPENNYKTTPPVLDSDGSFFLYSK |
| | | | | LTVDKSRWQQGNVFSCSVMHEALHNHYTQKS |
| | | | | LSLSPGKGGGGSGGGGSGGGGSGGGGSGGGG |
| | | | | SGGGGSDKTHTCPPCPAPELLGGPSVFLFPPKP |
| | | | | KDTLMISRTPEVTCVVVDVSHEDPEVKFNWYV |
| | | | | DGVEVHNAKTKPCEEQYGSTYRCVSVLTVLH |
| | | | | QDWLNGKEYKCKVSNKALPAPIEKTISKAKGQ |
| | | | | PREPQVYTLPPSREEMTKNQVSLTCLVKGFYPS |
| | | | | DIAVEWESNGQPENNYKTTPPVLDSDGSFFLYS |
| | | | | KLTVDKSRWQQGNVFSCSVMHEALHNHYTQK |
| | | | | SLSLSPGKGGGGQVTLKESGPTLVKPTETLTLT |
| | | | | CTVSGFSFRNARMGVSWIRQPPGKALEWLAHI |
| | | | | FSNDEKSYSTSLKSRLTISKDTSKSQVVLTMTN |
| | | | | MDPVDTATYFCARVPEYSSGWYRFDYWGQGT |
| | | | | LVTVSSASTKGPSVFPLAPSSKSTSGGTAALGC |
| | | | | LVKDYFPEPVTVSWNSGALTSGVHTFPAVLQS |
| | | | | SGLYSLSSVVTVPSSSLGTQTYICNVNHKPSNT |
| | | | | KVDKKVEPKSCGGGGSGGGGSGGGGSGGGGS |
| | | | | GGGGSGGGGSGGGGSGGGGSDIQMTQSPSSLS |
| | | | | ASVGDRVTISCRASQSIRSYLNWYQQKPGKAP |
| | | | | KLLIYATSSLQGGVPSRFSGSGSGTDFTLTISSL |
| | | | | QPEDFATYYCQQSYSTPFTFGPGTKVEIKRTVA |
| | | | | APSVFIFPPSDEQLKSGTASVVCLLNNFYPREA |
| | | | | KVQWKVDNALQSGNSQESVTEQDSKDSTYSL |
| | | | | SSTLTLSKADYEKHKVYACEVTHQGLSSPVTK |
| | | | | SFNRGECSGGGGSEVQLVESGGGLVQPGGSLK |
| | | | | LSCAASGFTFNKYAMNWVRQAPGKCLEWVA |
| | | | | RIRSKYNNYATYYADSVKDRFTISRDDSKNTA |
| | | | | YLQMNNLKTEDTAVYYCVRHGNFGNSYISYW |
| | | | | AYWGQGTLVTVSSGGGGSGGGGSGGGGSQTV |
| | | | | VTQEPSLTVSPGGTVTLTCGSSTGAVTSGNYPN |
| | | | | WVQQKPGQAPRGLIGGTKFLAPGTPARFSGSL |
| | | | | LGGKAALTLSGVQPEDEAEYYCVLWYSNRWV |
| | | | | FGCGTKLTVL |
| 1105. | CL1 9-G4 scFab8 - | artificial | Aa | DYYMH |
| | HCDR1 | | | |
| 1106. | CL1 9-G4 scFab8 - | artificial | Aa | WINPNSGGPNYAQKFQG |
| | HCDR2 | | | |
| 1107. | CL1 9-G4 scFab8 - | artificial | Aa | EKHAVAGIGFDY |
| | HCDR3 | | | |
| 1108. | CL1 9-G4 scFab8 - | artificial | Aa | QASQDISNYLN |
| | LCDR1 | | | |
| 1109. | CL1 9-G4 scFab8 - | artificial | Aa | AASSLES |
| | LCDR2 | | | |
| 1110. | CL1 9-G4 scFab8 - | artificial | Aa | QQANSFPLT |
| | LCDR3 | | | |
| 1111. | CL1 9-G4 scFab8 - | artificial | Aa | QVQLVQSGAEVKKPGASVKVSCKASGYTFTD |
| | VH | | | YYMHWVRQAPGQGLEWMGWINPNSGGPNYA |
| | | | | QKFQGRVTMTRDTSISTAHMELSRLRSDDTAV |
| | | | | YYCAREKHAVAGIGFDYWGQGTLVTVSS |
| 1112. | CL1 9-G4 scFab8 - | artificial | Aa | DIQMTQSPSSVSASVGDRVTITCQASQDISNYL |
| | VL | | | NWYQQKPGKAPKLLIYAASSLESGVPSRFSGS |
| | | | | GSGTDFTLTISSLQPEDFATYYCQQANSFPLTFG |
| | | | | PGTKVDIK |
| 1113. | CL1 9-G4 scFab8 - | artificial | Aa | ASTKGPSVFPLAPSSKSTSGGTAALGCLVKDYF |
| | CH1 | | | PEPVTVSWNSGALTSGVHTFPAVLQSSGLYSLS |
| | | | | SVVTVPSSSLGTQTYICNVNHKPSNTKVDKKV |
| | | | | EPKSC |
| 1114. | CL1 9-G4 scFab8 - | artificial | Aa | RTVAAPSVFIFPPSDEQLKSGTASVVCLLNNFY |
| | CLK | | | PREAKVQWKVDNALQSGNSQESVTEQDSKDS |
| | | | | TYSLSSTLTLSKADYEKHKVYACEVTHQGLSS |
| | | | | PVTKSFNRGEC |
| 1115. | FL 4-E9 scFab8 - | artificial | Aa | NARMGVS |
| | HCDR1 | | | |
| 1116. | FL 4-E9 scFab8 - | artificial | Aa | HIFSNDEKSYSTSLKS |
| | HCDR2 | | | |
| 1117. | FL 4-E9 scFab8 - | artificial | Aa | VPEYSSGWYRFDY |
| | HCDR3 | | | |
| 1118. | FL 4-E9 scFab8 - | artificial | Aa | RASQSIRSYLN |
| | LCDR1 | | | |
| 1119. | FL 4-E9 scFab8 - | artificial | Aa | ATSSLQG |
| | LCDR2 | | | |
| 1120. | FL 4-E9 scFab8 - | artificial | Aa | QQSYSTPFT |
| | LCDR3 | | | |
| 1121. | FL 4-E9 scFab8 - | artificial | Aa | QVTLKESGPTLVKPTETLTLTCTVSGFSFRNAR |
| | VH | | | MGVSWIRQPPGKALEWLAHIFSNDEKSYSTSL |
| | | | | KSRLTISKDTSKSQVVLTMTNMDPVDTATYFC |
| | | | | ARVPEYSSGWYRFDYWGQGTLVTVSS |
| 1122. | FL 4-E9 scFab8 - | artificial | Aa | DIQMTQSPSSLSASVGDRVTISCRASQSIRSYLN |
| | VL | | | WYQQKPGKAPKLLIYATSSLQGGVPSRFSGSG |
| | | | | SGTDFTLTISSLQPEDFATYYCQQSYSTPFTFGP |
| | | | | GTKVEIK |
| 1123. | FL 4-E9 scFab8 - | artificial | Aa | ASTKGPSVFPLAPSSKSTSGGTAALGCLVKDYF |
| | CH1 | | | PEPVTVSWNSGALTSGVHTFPAVLQSSGLYSLS |
| | | | | SVVTVPSSSLGTQTYICNVNHKPSNTKVDKKV |
| | | | | EPKSC |
| 1124. | FL 4-E9 scFab8 - | artificial | Aa | RTVAAPSVFIFPPSDEQLKSGTASVVCLLNNFY |
| | CLK | | | PREAKVQWKVDNALQSGNSQESVTEQDSKDS |
| | | | | TYSLSSTLTLSKADYEKHKVYACEVTHQGLSS |
| | | | | PVTKSFNRGEC |
| 1125. | (G4S)8 - Linker | artificial | Aa | GGGGSGGGGSGGGGSGGGGSGGGGSGGGGSG |
| | | | | GGGSGGGGS |
| 1126. | CD3 F2B - | artificial | Aa | DYAMH |
| | HCDR1 | | | |
| 1127. | CD3 F2B - | artificial | Aa | GISWNSGSIGYADSVKG |
| | HCDR2 | | | |
| 1128. | CD3 F2B - | artificial | Aa | DSRGYGDYRLGGAY |
| | HCDR3 | | | |
| 1129. | CD3 F2B-LCDR1 | artificial | Aa | RASQSVSSNLA |
| 1130. | CD3 F2B-LCDR2 | artificial | Aa | GASTRAT |
| 1131. | CD3 F2B-LCDR3 | artificial | Aa | QQYNNWPWT |
| 1132. | CD3 F2B-VH | artificial | Aa | EVQLVESGGGLVQPGRSLRLSCAASGFTEDDY |
| | | | | AMHWVRQAPGKGLEWVSGISWNSGSIGYADS |
| | | | | VKGRFTISRDNAKNSLYLQMNSLRAEDTALYY |
| | | | | CAKDSRGYGDYRLGGAYWGQGTLVTVSS |
| 1133. | CD3 F2B- VL | artificial | Aa | EIVMTQSPATLSVSPGERATLSCRASQSVSSNL |
| | | | | AWYQQKPGQAPRLLIYGASTRATGIPARFSGS |
| | | | | GSGTEFTLTISSLQSEDFAVYYCQQYNNWPWT |
| | | | | FGQGTKVEIK |
| 1134. | CD3 F2B scFab8 - | artificial | Aa | ASTKGPSVFPLAPSSKSTSGGTAALGCLVKDYF |
| | CH1 | | | PEPVTVSWNSGALTSGVHTFPAVLQSSGLYSLS |
| | | | | SVVTVPSSSLGTQTYICNVNHKPSNTKVDKKV |
| | | | | EPKSC |
| 1135. | CD3 F2B scFab8 - | artificial | Aa | RTVAAPSVFIFPPSDEQLKSGTASVVCLLNNFY |
| | CLK | | | PREAKVQWKVDNALQSGNSQESVTEQDSKDS |
| | | | | TYSLSSTLTLSKADYEKHKVYACEVTHQGLSS |
| | | | | PVTKSFNRGEC |
| 1136. | CD3 FJan - | artificial | Aa | TYAMN |
| | HCDR1 | | | |
| 1137. | CD3 FJan - | artificial | Aa | RIRSKYNNYATYYAASVKK |
| | HCDR2 | | | |
| 1138. | CD3 FJan - | artificial | Aa | HGNFGNSYVSWFAY |
| | HCDR3 | | | |
| 1139. | CD3 FJan-LCDR1 | artificial | Aa | RSSTGAVTTSNYAN |
| 1140. | CD3 FJan-LCDR2 | artificial | Aa | GTNKRAP |
| 1141. | CD3 FJan-LCDR3 | artificial | Aa | ALWYSNLWV |
| 1142. | CD3 FCel - | artificial | Aa | TYAMN |
| | HCDR1 | | | |
| 1143. | CD3 FCel - | artificial | Aa | RIRSKYNNYATYYADSVKG |
| | HCDR2 | | | |
| 1144. | CD3 FCel - | artificial | Aa | HGNFGNSYVSWFAY |
| | HCDR3 | | | |
| 1145. | CD3 FCel-LCDR1 | artificial | Aa | GSSTGAVTSNYAN |
| 1146. | CD3 FCel-LCDR2 | artificial | Aa | GTNKRAP |
| 1147. | CD3 FCel-LCDR3 | artificial | Aa | ALWYSNLWV |
| 1148. | CD3 FHar - | artificial | Aa | KYAIN |
| | HCDR1 | | | |
| 1149. | CD3 FHar - | artificial | Aa | RIRSKYNNYATYYAQVKD |
| | HCDR2 | | | |
| 1150. | CD3 FHar - | artificial | Aa | HANFGNSYISYWAY |
| | HCDR3 | | | |
| 1151. | CD3 FHar- | artificial | Aa | ASSTGAVTSGNYPN |
| | LCDR1 | | | |
| 1152. | CD3 FHar- | artificial | Aa | GTKFLVP |
| | LCDR2 | | | |
| 1153. | CD3 FHar- | artificial | Aa | TLWYSNRWV |
| | LCDR3 | | | |
| 1154. | CDH3 HCDR1 | artificial | Aa | XXXXX |
| | consencus | | | |
| 1155. | CDH3 HCDR2 | artificial | Aa | XIXXXXXXTXYXXXXXG |
| | consencus | | | |
| 1156. | CDH3 HCDR3 | artificial | Aa | SRGVYDXXXXXXXYXMDX |
| | consencus | | | |
| 1157. | CDH3 VH | artificial | Aa | XVQLXXSGXXXXXPGXSXXXSCXASGXXFXX |
| | consensus | | | XXXXWVRQXPGXCLEWXXXIXXXXXTXYXX |
| | | | | XXXGRXTXXXDXSXXTXYXXXXXLXXXDXA |
| | | | | VYYCAXXRGVYDFKXXXALXXXDXWGQGTX |
| | | | | VTVSS |
| 1158. | CDH3 LCDR1 | artificial | Aa | XXSXXXLYSSNQXXYXX |
| | consencus | | | |
| 1159. | CDH3 LCDR2 | artificial | Aa | XXXXXXX |
| | consencus | | | |
| 1160. | CDH3 LCDR3 | artificial | Aa | XXXXXXPXT |
| | consencus | | | |
| 1161. | CDH3 VL | artificial | Aa | XIXXTQSPXXLXXSXGXRXTXXCXXSXXXLY |
| | consensus | | | NQXXYXXWYQQKPGXXPXLLXYXXXXXXXG |
| | | | | VPXRFSGSGSGTXFTLXISXLQXEDXXXYYCX |
| | | | | XXXXXPXTFGCGTKXXIK |
| 1162. | MSLN HCDR1 | artificial | Aa | SSXYXXX |
| | consencus | | | |
| 1163. | MSLN HCDR2 | artificial | Aa | XIXXXXXXXXXXXXXXX |
| | consencus | | | |
| 1164. | MSLN HCDR3 | artificial | Aa | XXXXXGXXSYXPXXXXXXXDX |
| | consencus | | | |
| 1165. | MSLN VH | artificial | Aa | XVQLXXSGXXXXXPXXXXXXXCXXSGGSXX |
| | consensus | | | XXXYXXXWXRQXPGXXLEWXXXIXXXXXXX |
| | | | | XYXXXXXXRXTXXXDXXXXXXXXXXXXXX |
| | | | | XXDTAVYYCAXXXXXXXXXSYYPXYYXXXX |
| | | | | DXWGQGTXVTVSS |
| 1166. | MSLN LCDR1 | artificial | Aa | RXXXXXXXXXXX |
| | consencus | | | |
| 1167. | MSLN LCDR2 | artificial | Aa | XXXXXXX |
| | consencus | | | |
| 1168. | MSLN LCDR3 | artificial | Aa | QXXXXXXIXX |
| | consencus | | | |
| 1169. | MSLN VL | artificial | Aa | XXXXTQXPXXXSXSXG1XXXXXCRXXXXXXX |
| | consensus | | | XXXXWYQQKPGXXPXLXIYXXXXXXXGXPX |
| | | | | RFSGSXSGXXXTLTISXXXXXDXAXYYCQXXX |
| | | | | XXXIXXFGXGTKXXXX |
| 1170. | Human CDH3 | human | Aa | MGLPRGPLASLLLLQVCWLQCAASEPCRAVFR |
| | | | | EAEVTLEAGGAEQEPGQALGKVFMGCPGQEP |
| | | | | ALFSTDNDDFTVRNGETVQERRSLKERNPLKIF |
| | | | | PSKRILRRHKRDWVVAPISVPENGKGPFPQRLN |
| | | | | QLKSNKDRDTKIFYSITGPGADSPPEGVFAVEK |
| | | | | ETGWLLLNKPLDREEIAKYELFGHAVSENGAS |
| | | | | VEDPMNISIIVTDQNDHKPKFTQDTFRGSVLEG |
| | | | | VLPGTSVMQVTATDEDDAIYTYNGVVAYSIHS |
| | | | | QEPKDPHDLMFTIHRSTGTISVISSGLDREKVPE |
| | | | | YTLTIQATDMDGDGSTTTAVAVVEILDANDNA |
| | | | | PMFDPQKYEAHVPENAVGHEVQRLTVTDLDA |
| | | | | PNSPAWRATYLIMGGDDGDHFTITTHPESNQGI |
| | | | | LTTRKGLDFEAKNQHTLYVEVTNEAPFVLKLP |
| | | | | TSTATIVVHVEDVNEAPVFVPPSKVVEVQEGIP |
| | | | | TGEPVCVYTAEDPDKENQKISYRILRDPAGWL |
| | | | | AMDPDSGQVTAVGTLDREDEQFVRNNIYEVM |
| | | | | VLAMDNGSPPTTGTGTLLLTLIDVNDHGPVPEP |
| | | | | RQITICNQSPVRQVLNITDKDLSPHTSPFQAQLT |
| | | | | DDSDIYWTAEVNEEGDTVVLSLKKFLKQDTYD |
| | | | | VHLSLSDHGNKEQLTVIRATVCDCHGHVETCP |
| | | | | GPWKGGFILPVLGAVLALLFLLLVLLLLVRKK |
| | | | | RKIKEPLLLPEDDTRDNVFYYGEEGGGEEDQD |
| | | | | YDITQLHRGLEARPEVVLRNDVAPTIIPTPMYR |
| | | | | PRPANPDEIGNFIIENLKAANTDPTAPPYDTLLV |
| | | | | FDYEGSGSDAASLSSLTSSASDQDQDYDYLNE |
| | | | | WGSRFKKLADMYGGGEDD |
| 1171. | Human CDH3 | human | Aa | VAYSIHSQEPKDPHDLMFTIHRSTGTISVISSGL |
| | epitope cluster | | | DREK |
| | D2B | | | |
| 1172. | Human CDH3 | human | Aa | VPEYTLTIQATDMDGDGSTTTAVAVVEILDAN |
| | epitope cluster | | | DNAPM |
| | D2C | | | |
| 1173. | Human CDH3 | human | Aa | FDPQKYEAHVPENAVGHEVQRLTVTDLDAPNS |
| | epitope cluster | | | PAWR |
| | D3A | | | |
| 1174. | Human CDH3 | human | Aa | YRILRDPAGWLAMDPDSGQVTAVGTLDREDE |
| | epitope cluster | | | QFVRN |
| | D4B | | | |
| 1175. | Human MSLN | human | Aa | EVEKTACPSGKKAREIDESLIFYKKWELEACVD |
| | epitope cluster E1 | | | AALLATQMDRVNAIPFTY |
| 1176. | Human MSLN | human | Aa | EQLDVLKHKLDELYPQGYPESVIQHLGYLFLK |
| | epitope cluster E2 | | | MSPEDI |
| 1177. | Human MSLN | human | Aa | RKWNVTSLETLKALLEVNKGHEMSPQVATLID |
| | epitope cluster E3 | | | RFVKGRGQLDKDTLDTLTAFYPGYLCSLSPEEL |
| | | | | SSVP |
| 1178. | Human MSLN | human | Aa | PSSIWAVRPQDLDTCDPRQLDVLYPKARLAFQ |
| | epitope cluster E4 | | | NMNGSEYFVKIQSFLG |
| 1179. | Human MSLN | human | Aa | GAPTEDLKALSQQNVSMDLATFMKLRTDAVL |
| | epitope cluster E5 | | | PLTVAEVQKLLGP |
| 1180. | Human MSLN v1 | human | Aa | MALPTARPLLGSCGTPALGSLLFLLFSLGWVQP |
| | NM_005823 | | | SRTLAGETGQEAAPLDGVLANPPNISSLSPRQL |
| | | | | LGFPCAEVSGLSTERVRELAVALAQKNVKLST |
| | | | | EQLRCLAHRLSEPPEDLDALPLDLLLFLNPDAF |
| | | | | SGPQACTRFFSRITKANVDLLPRGAPERQRLLP |
| | | | | AALACWGVRGSLLSEADVRALGGLACDLPGR |
| | | | | FVAESAEVLLPRLVSCPGPLDQDQQEAARAAL |
| | | | | QGGGPPYGPPSTWSVSTMDALRGLLPVLGQPII |
| | | | | RSIPQGIVAAWRQRSSRDPSWRQPERTILRPRF |
| | | | | RREVEKTACPSGKKAREIDESLIFYKKWELEAC |
| | | | | VDAALLATQMDRVNAIPFTYEQLDVLKHKLD |
| | | | | ELYPQGYPESVIQHLGYLFLKMSPEDIRKWNV |
| | | | | TSLETLKALLEVNKGHEMSPQVATLIDRFVKG |
| | | | | RGQLDKDTLDTLTAFYPGYLCSLSPEELSSVPP |
| | | | | SSIWAVRPQDLDTCDPRQLDVLYPKARLAFQN |
| | | | | MNGSEYFVKIQSFLGGAPTEDLKALSQQNVSM |
| | | | | DLATFMKLRTDAVLPLTVAEVQKLLGPHVEGL |
| | | | | KAEERHRPVRDWILRQRQDDLDTLGLGLQGGI |
| | | | | PNGYLVLDLSMQEALSGTPCLLGPGPVLTVLA |
| | | | | LLLASTLA |
| 1181. | Human MSLN v2 | human | Aa | MALPTARPLLGSCGTPALGSLLFLLFSLGWVQP |
| | NM_013404 | | | SRTLAGETGQEAAPLDGVLANPPNISSLSPRQL |
| | | | | LGFPCAEVSGLSTERVRELAVALAQKNVKLST |
| | | | | EQLRCLAHRLSEPPEDLDALPLDLLLFLNPDAF |
| | | | | SGPQACTRFFSRITKANVDLLPRGAPERQRLLP |
| | | | | AALACWGVRGSLLSEADVRALGGLACDLPGR |
| | | | | FVAESAEVLLPRLVSCPGPLDQDQQEAARAAL |
| | | | | QGGGPPYGPPSTWSVSTMDALRGLLPVLGQPII |
| | | | | RSIPQGIVAAWRQRSSRDPSWRQPERTILRPRF |
| | | | | RREVEKTACPSGKKAREIDESLIFYKKWELEAC |
| | | | | VDAALLATQMDRVNAIPFTYEQLDVLKHKLD |
| | | | | ELYPQGYPESVIQHLGYLFLKMSPEDIRKWNV |
| | | | | TSLETLKALLEVNKGHEMSPQAPRRPLPQVAT |
| | | | | LIDRFVKGRGQLDKDTLDTLTAFYPGYLCSLSP |
| | | | | EELSSVPPSSIWAVRPQDLDTCDPRQLDVLYPK |
| | | | | ARLAFQNMNGSEYFVKIQSFLGGAPTEDLKAL |
| | | | | SQQNVSMDLATFMKLRTDAVLPLTVAEVQKL |
| | | | | LGPHVEGLKAEERHRPVRDWILRQRQDDLDTL |
| | | | | GLGLQGGIPNGYLVLDLSMQEALSGTPCLLGP |
| | | | | GPVLTVLALLLASTLA |
| 1182. | Human MSLN v6 | human | Aa | MALPTARPLLGSCGTPALGSLLFLLFSLGWVQP |
| | AY743922 | | | SRTLAGETGQEAAPLDGVLANPPNISSLSPRQL |
| | | | | LGFPCAEVSGLSTERVRELAVALAQKNVKLST |
| | | | | EQLRCLAHRLSEPPEDLDALPLDLLLFLNPDAF |
| | | | | SGPQACTHFFSRITKANVDLLPRGAPERQRLLP |
| | | | | AALACWGVRGSLLSEADVRALGGLACDLPGR |
| | | | | FVAESAEVLLPRLVSCPGPLDQDQQEAARAAL |
| | | | | QGGGPPYGPPSTWSVSTMDALRGLLPVLGQPII |
| | | | | RSIPQGIVAAWRQRSSRDPSWRQPERTILRPRF |
| | | | | RREVEKTACPSGKKAREIDESLIFYKKWELEAC |
| | | | | VDAALLATQMDRVNAIPFTYEQLDVLKHKLD |
| | | | | ELYPQGYPESVIQHLGYLFLKMSPEDIRKWNV |
| | | | | TSLETLKALLEVNKGHEMSPQVATLIDRFVKG |
| | | | | RGQLDKDTLDTLTAFYPGYLCSLSPEELSSVPP |
| | | | | SSIWAVRPQDLDTCDPRQLDVLYPKARLAFQN |
| | | | | MNGSEYFVKIQSFLGGAPTEDLKALSQQNVSM |
| | | | | DLATFMKLRTDAVLPLTVAEVQKLLGPHVEGL |
| | | | | KAEERHRPVRDWILRQRQDDLDTLGLGLQGGI |
| | | | | PNGYLVLDLSVQEALSGTPCLLGPGPVLTVLAL |
| | | | | LLASTLA |
| 1183. | MSLN 5F11 xI2C- | artificial | aa | QVQLVESGGGLVKPGGSLRLSCAASGFTFSDY |
| | scFc | | | YMTWIRQAPGKGLEWLSYISSSGSTIYYADSV |
| | _HLE_bispecific | | | KGRFTISRDNAKNSLFLQMNSLRAEDTAVYYC |
| | molecule | | | ARDRNSHFDYWGQGTLVTVSSGGGGSGGGGS |
| | | | | GGGGSDIQMTQSPSSVSASVGDRVTITCRASQG |
| | | | | INTWLAWYQQKPGKAPKLLIYGASGLQSGVPS |
| | | | | RFSGSGSGTDFTLTISSLQPEDFATYYCQQAKSF |
| | | | | PRTFGQGTKVEIKSGGGGSEVQLVESGGGLVQ |
| | | | | PGGSLKLSCAASGFTFNKYAMNWVRQAPGKG |
| | | | | LEWVARIRSKYNNYATYYADSVKDRFTISRDD |
| | | | | SKNTAYLQMNNLKTEDTAVYYCVRHGNFGNS |
| | | | | YISYWAYWGQGTLVTVSSGGGGSGGGGSGGG |
| | | | | GSQTVVTQEPSLTVSPGGTVTLTCGSSTGAVTS |
| | | | | GNYPNWVQQKPGQAPRGLIGGTKFLAPGTPAR |
| | | | | FSGSLLGGKAALTLSGVQPEDEAEYYCVLWYS |
| | | | | NRWVFGGGTKLTVLGGGGDKTHTCPPCPAPEL |
| | | | | LGGPSVFLFPPKPKDTLMISRTPEVTCVVVDVS |
| | | | | HEDPEVKFNWYVDGVEVHNAKTKPCEEQYGS |
| | | | | TYRCVSVLTVLHQDWLNGKEYKCKVSNKALP |
| | | | | APIEKTISKAKGQPREPQVYTLPPSREEMTKNQ |
| | | | | VSLTCLVKGFYPSDIAVEWESNGQPENNYKTT |
| | | | | PPVLDSDGSFFLYSKLTVDKSRWQQGNVFSCS |
| | | | | VMHEALHNHYTQKSLSLSPGKGGGGSGGGGS |
| | | | | GGGGSGGGGSGGGGSGGGGSDKTHTCPPCPAP |
| | | | | ELLGGPSVFLFPPKPKDTLMISRTPEVTCVVVD |
| | | | | VSHEDPEVKFNWYVDGVEVHNAKTKPCEEQY |
| | | | | GSTYRCVSVLTVLHQDWLNGKEYKCKVSNKA |
| | | | | LPAPIEKTISKAKGQPREPQVYTLPPSREEMTK |
| | | | | NQVSLTCLVKGFYPSDIAVEWESNGQPENNYK |
| | | | | TTPPVLDSDGSFFLYSKLTVDKSRWQQGNVFS |
| | | | | CSVMHEALHNHYTQKSLSLSPGK |

1. An antigen-binding molecule comprising at least one polypeptide chain, wherein the molecule comprises
(i) a first binding domain, which specifically binds to a first target cell surface antigen (e.g. TAA1),
(ii) a second binding domain, which specifically binds to an extracellular epitope of the human and/or the Macaca CD3ε chain,
(iii) a third binding domain, which specifically binds to a second target cell surface antigen (e.g. TAA2), and
(iv) a fourth binding domain, which—specifically binds to an extracellular epitope of the human and/or the Macaca CD3ε chain,
wherein the first binding domain and the second binding domain form a first bispecific entity and the third and the fourth binding domain form a second bispecific entity, and
wherein the molecule comprises a spacer entity having a molecular weight of at least about 5 kDa and/or having a length of at more than 50 amino acids,
wherein the spacer entity spaces apart the first and the second bispecific entity by at least a distance of about 50 Å,
wherein the indicated distance is understood as the distance between centers of mass of the first and the second bispecific entity,
wherein the spacer entity is a globular protein, and comprises an amino acid sequence selected the group consisting of: ubiquitin (SEQ ID NO: 1081), beta 2 microglobulin (SEQ ID NO: 1083), SAND domain (SEQ ID NO: 1084), VHH antibody lama domain (SEQ ID NO: 1086), PD-1 binding domain from human Programmed cell death 1 ligand 1 (PDL1) (SEQ ID NO: 1093), a programmed cell death protein 1 (PD1) domain (SEQ ID NO: 16), human serum albumin (HSA) (SEQ ID NO: 15), single chain Fc (scFc) (SEQ ID NO: 25, 26, 27, 28, 29, 30, 31, 32, or 33), and double scFc (SEQ ID NO: 30),
wherein the spacer entity is positioned between the first and the second bispecific entity,
wherein the first binding domain is capable of binding to the first target cell surface antigen and the third binding domain is capable of binding to the second target cell surface antigen simultaneously,
wherein the first target cell surface antigen and the second target cell surface antigen are on the same target cell, and
wherein the first target cell surface antigen and the second target cell surface antigen are not identical.

2. The antigen-binding molecule of claim 1 which is a multitargeting bispecific antigen-binding molecule.

3. The antigen-binding molecule of claim 2, wherein the arrangement of domains in an amino to carboxyl order is selected from the group consisting of
(i) first and second domain, spacer, third and fourth domain,
(ii) first and second domain, spacer, fourth and third domain,
(iii) second and the first domain, spacer, third and fourth domain, and
(iv) second and first domain, spacer, fourth and third domain.

4. The antigen-binding molecule of claim 1, wherein said spacer entity has a molecular weight of at least 10 kDa, and/or wherein said spacer entity comprises an amino acid sequence which comprises more than 50 amino acids.

5. (canceled)

6. The antigen-binding molecule of claim 1, wherein the spacer entity is a globular protein, wherein the distance between the C alpha atoms of the first amino acid located at the N-terminus and the last amino acid at the C-terminus are spaced apart by at least 20 Å, in order to effectively space apart the first and the second bispecific entity.

7-10. (canceled)

11. The antigen-binding molecule of claim 1, wherein the molecule is a single polypeptide chain.

12. (canceled)

13. The antigen-binding molecule of claim 1, wherein the molecule comprises two polypeptide chains.

14. An antigen-binding molecule comprising two polypeptide chains, wherein
(i) the first polypeptide chain comprises a first binding domain which specifically binds to a first target cell surface antigen, a second binding domain which specifically binds to an extracellular epitope of the human and/or the Macaca CD3ε chain, and a first polypeptide monomer comprising a hinge, a CH2 domain and a CH3 domain, and
(ii) the second polypeptide chain comprises a third binding domain which specifically binds to a second target cell surface antigen, a fourth binding domain which specifically binds to an extracellular epitope of the human and/or the Macaca CD3ε chain, and a second polypeptide monomer comprising a hinge, a CH2 domain and a CH3 domain,
wherein the two polypeptide monomers form a heterodimer pairing the CH2 and the CH3 domains of the two peptide monomers, respectively, wherein the CH2 domain of the first peptide monomer is linked to the first or second domain of the first bispecific entity in C-terminal position of said entity, and wherein the CH3 domain of the second peptide monomer is linked to the third or fourth domain of the second bispecific entity in N-terminal position of said entity, i.e. the N-terminus of the second polypeptide chain is at the CH2 domain of the second polypeptide monomer and the C-terminus is at the third or fourth domain,
wherein the first and second polypeptide monomer form a heterodimer, thereby connecting the first and the second polypeptide chain, wherein the first binding domain is capable of binding to the first target cell surface antigen and the third binding domain is capable of binding to the second target cell surface antigen simultaneously, wherein the first target cell surface antigen and the second target cell surface antigen are on the same target cell.

15. The antigen-binding molecule of claim 14, wherein the first peptide monomer of the first peptide chain is SEQ ID NO 35 and the second peptide monomer of the second peptide chain is SEQ ID NO 36, and wherein the two peptide monomers form a heterodimer.

16. The antigen-binding molecule of claim 1, wherein
(i) the first and third domains comprise two antibody-derived variable domains and the second and the fourth domains comprises two antibody-derived variable domains;
(ii) the first and third domains comprise one antibody-derived variable domain and the second and the fourth domains comprises two antibody-derived variable domains;
(iii) the first and third domains comprise two antibody-derived variable domains and the second and the fourth domains comprise one antibody-derived variable domain; or
(iv) the first domain comprises one antibody-derived variable domain and the third domain comprises one antibody-derived variable domain.

17. The antigen-binding molecule of claim 14, wherein the antigen-binding molecule comprises two polypeptide chains, wherein
the first polypeptide chain comprises a VH of the first domain, a VH second domain, the first polypeptide monomer comprising a hinge, a CH2 and a CH3 domain, a VH of the third domain, and a VH of the fourth domain; and
the second polypeptide chain comprises a VL of the first domain, a VL second domain, the first polypeptide monomer comprising a hinge, a CH2 and a CH3 domain, a VL of the third domain, and a VL of the fourth domain,
wherein the first and second polypeptide monomers form a heterodimer, thereby connecting the first and the second polypeptide chain.

18. The antigen-binding molecule of claim 1, wherein the antigen binding molecule, wherein the first, second, third and fourth binding domains each comprise in an amino to carboxyl order a VH domain and a VL domain,
wherein the VH and VL within each domain is connected by a peptide linker, which is a flexible linker which comprises serine, glutamine and/or glycine as amino acid building blocks.

19. The antigen-binding molecule of claim 1, wherein the peptide linker comprises or consists of S(G4X)n and (G4X)n, wherein X is selected from the group consisting of Q, T, N, C, G, A, V, I, L, and M, and wherein n is an integer selected from integers 1 to 20, preferably wherein X is Q, wherein preferably the peptide linker is (G4X)n, and X is Q.

20. The antigen-binding molecule of claim 1, wherein the peptide linker between the first binding domain and the second binding domain and the third binding domain and the fourth binding domain is preferably a flexible linker which comprises serine, glutamine and/or glycine or glutamic acid, alanine and lysine as amino acid building blocks.

21. The antigen-binding molecule of claim 1, wherein the peptide linker between the first binding domain or the second binding domain and the spacer, and/or the third binding domain and the fourth binding domain and the spacer, respectively, is a short linker rich in small and/or hydrophilic amino acids.

22. The antigen-binding molecule of claim 1, wherein any of the first target cell surface antigen and the second target cell surface antigen is selected from the group consisting of CS1, BCMA, CDH3, FLT3, CD123, CD20, CD22, EpCAM, MSLN and CLL1.

23-25. (canceled)

26. The antigen-binding molecule of claim 1, wherein the first target cell surface antigen and the second target cell surface antigen, respectively, are selected from the group consisting of CS1 and BCMA, BCMA and CS1, FLT3 and CD123, CD123 and FLT3, CD20 and CD22, CD22 and CD20, EpCAM and MSLN, MSLN and EpCAM, MSLN and CDH3, CDH3 and MSLN, FLT3 and CLL1, and CLL1 and FLT3.

27. The antigen-binding molecule of claim 1, wherein the first target cell surface antigen and/or the second target cell surface antigen is human MSLN (selected from SEQ ID NOs: 1181, 1182 and 1183), and wherein the first and/or third binding domain of the antigen-binding molecule of the invention binds to human MSLN epitope cluster E1 (SEQ ID NO: 1175, aa 296-346 position according to Kabat) as determined by murine chimere sequence analysis as described herein, but not to human MSLN epitope cluster E2 (SEQ ID NO: 1176, aa 247-384 position according to Kabat), E3 (SEQ ID NO: 1177, aa 385-453 position according to Kabat), E4 (SEQ ID NO: 1178, aa 454-501 position according to Kabat) and/or E5 (SEQ ID NO: 1179 aa 502-545 position according to Kabat), or wherein the first target cell surface antigen and/or the second target cell surface antigen is human CDH3 (SEQ ID NOs: 1170), and wherein the first and/or third binding domain of the antigen-binding molecule of claim 1 binds to human CDH3 epitope cluster D2B (SEQ ID NO: 1171, aa 253-290 position according to Kabat), D2C (SEQ ID NO: 1172 aa 291-327 position according to Kabat), D3A (SEQ ID NO: 1173 aa 328-363 position according to Kabat) and D4B (SEQ ID NO: 1174, aa 476-511 position according to Kabat) as determined by murine chimere sequence analysis.

28. (canceled)

29. The antigen-binding molecule of claim 1, wherein the second binding domain and the fourth binding domain both have an affinity lower than characterized by a KD value of about 1.2×10-8 M measured by surface plasmon resonance (SPR), or an affinity characterized by a KD value of about 1.2×10-8 M measured by SPR.

30. The antigen-binding molecule of claim 1, wherein the second binding domain and the fourth binding domain have an affinity characterized by a KD value of about 1.0×10-7 to 5.0×10-6 M measured by SPR.

31. (canceled)

32. The antigen-binding molecule of claim 1, wherein each of the second and the fourth binding domain (CD3 binding domains) individually has an at least about 10-fold lower activity than one CD3 binding domain comprising a VH according to SEQ ID NO 43 and a VL according to SEQ ID NO 44 (i.e. in a mono targeting context in contrast to a dual targeting context).

33. The antigen-binding molecule of claim 1, wherein the second and the fourth binding domain comprise a VH region comprising CDR-H 1, CDR-H2 and CDR-H3 selected from SEQ ID NOs 37 to 39, 45 to 47, 53 to 55, 61 to 63, 69 to 71, 436 to 438, 1126 to 1128, 1136 to 1138, 1142 to 1144, and 1148 to 1150, and a VL region comprising CDR-L1, CDR-L2 and CDR-L3 selected from SEQ ID NOs 40 to 42, 48 to 50, 56 to 58, 64 to 66, 72 to 74, 439 to 441, 1129 to 1131, 1139 to 1141, 1145 to 1147, and 1151 to 1153.

34. The antigen-binding molecule of claim 1, wherein the second and fourth binding domain comprise a VH region selected from SEQ ID NOs 43, 51, 59, 67, 75, 442 and 1132.

35. The antigen-binding molecule of claim 1, wherein the second and fourth binding domain comprise a VL region selected from SEQ ID NOs 44, 52, 60, 68, 76, 443 and 1133.

36. The antigen-binding molecule of claim 1, wherein the second binding domain and fourth binding domain comprising a VH region selected from SEQ ID NOs 43, 51, 59, 67, 75, 442 and 1132, and a VL region selected from SEQ ID NOs 44, 52, 60, 68, and 76, 443 and 1133, preferably 68, wherein when the VH region is 1132 and the VL region is 1133, the second binding domain and/or fourth binding domain as scFab domain additionally comprises a CH1 domain of SEQ ID NO: 1134 and a CLK domain of SEQ ID NO: 1135, and wherein the VH and VL region are linked to each other by a linker selected from SEQ ID NO 1, and 3 and 1125.

37. The antigen-binding molecule of claim 1, wherein the first binding domain and/or the third binding domain bind to CDH3 and comprise a VH region comprising SEQ ID NO: 1154 as CDR-H 1 wherein X1 is S or N, X2 is Y or S, X3 is P or W, X4 is I or M and X5 is Y, N or H; SEQ ID NO: 1155 as CDR-H2 wherein X1 is K, V, N or R; X2 is A, D, R, Y, S, W or H; X3 is Y, S, P, G or T; X4 is S, G or K; X5 is A, V, D, K, G, or T; X6 is A, V, D, K, S, G or H; X7 is Y, G, or E; X8 is K, I, or N; X9 is A, S, or N; X10 is S, Q or G; X11 is S or K; X12 is F or V; and X13 is K or Q; and SEQ ID NO: 1156 as CDR-H3, wherein X1 is F or Q; X2 is R,K,S or W; X3 is G or D; X4 is Y, P or R; X5 is R, S, G, N or T; X6 is Y, A or H; X7 is F, L or M; X8 is A or V; and X9 is Y or V; and wherein the first binding domain and/or the third (target) binding domain bind to CDH3 and comprise a VL region comprising SEQ ID NO: 1158 as CDR-L 1 wherein X1 is K or R, X2 is A or S; X3 is Q,D,S,G or E; X4 is S, D or N; X5 is V, L or I; X6 is, K, Y, S, or H; X7 is S or N; X8 is F, L or M; and X9 is A,N or H; SEQ ID NO: 1159 as CDR-L 2 wherein X1 is Y, G, W, or N; X2 is T or A; X3 is S or K; X4 is T, N or R; X5 is L or R; X6 is E, A, V or H; and X7 is S or E; and SEQ ID NO: 1160 as CDR-L3 wherein X1 is Q or V; X2 is Q, N or H; X3 is F, L, Y, W, N, or H; X4 is A, D, Y, S or N; X5 is Q, R, S, G, W or M; X6 is T, Y or F; and X7 is F, Y or L.

38. The antigen-binding molecule of claim 1, wherein the first binding domain and/or the third (target) binding domain bind to MSLN and comprise a VH region comprising SEQ ID NO: 1162 as CDR-H 1 wherein X1 is S, G or D; X2 is Y, A, G or F; X3 is I, W, or M; and X4 is V, S, G, T, or H; SEQ ID NO: 1163 as CDR-H 2 wherein X1 is A, S, N, W, Y, or V; X2 is Y, S or N; X3 is Y, G, P, or S; X4 is D, H, S, or N; X5 is G or S; X6 is E, G or S; X7 is G, S, N, F, T or Q; X8 is S, W, K, D, I or T; X9 is Y or N; X10 is A or N; X11 is A, P, N, D, E, I or Q; X12 is D, A, S or K; X13 is V, L, or F; X14 is K or Q; and X15 is G or S; and SEQ ID NO: 1164 as CDR-H 3 wherein X1 is D, E or V; X2 is R, G, or E; X3 is Y, A, or N; X4 is S,Y,V, or H; X5 is A,P,F, Y, or H; X6 is R or S; X7 is E or G; X8 is Y or L; X9 is R, Y or L; X10 is Y or G; X11 is D or Y; X12 is R, Y, or F; X13 is M,S,F,D or Y; X14 is A, G, S, or T; X15 is L, M, or F; and X16 is Y, I or V; and wherein the first binding domain and/or the third binding domain bind to MSLN and comprise a VL region comprising SEQ ID NO: 1166 as CDR-L 1 wherein X1 is A or S; X2 is G or S; X3 is E or Q; X4 is G,S or K; X5 is I, L, V or F; X6 is R,G or S; X7 is D,S,N or T; X8 is A,S,K or T; X9 is Y or W; X10 is V or L; and X11 is Y or A; SEQ ID NO 1167 as CDR-L2 wherein X1 is A,G or Q; X2 is A or S; X3 is S or T; X4 is G, S, K, I or T; X5 is R or L; X6 is A, P or Q; and X7 is S or T; and SEQ ID NO 1168 as CDR-L 3 wherein X1 is A or Q; X2 is Y, S, A, or T; X3 is G, E, Y, H or Q; X4 is A or S; X5 is S, T or F; X6 is P or T; X7 is R, A, L or F; and X8 is V or T.

39. The antigen-binding molecule of claim 1, wherein the first binding domain and/or the third binding domain bind to CDH3 and comprise a VH region of SEQ ID NO: 1157 wherein X1 is Q or E; X2 is V,L; X3 is Q,E; X4 is A or G; X5 is G or E; X6 is V or L; X7 is K or V X8 is K or Q, X9 is A or G, X10 is V or L, X11 is K or R, X12 is V or L, X13 is A or K, X14 is Y or F, X15 is T or S, X16 is T or S, X17 is S or N, X18 is Y or S, X19 is P or W, X20 is I or M, X21 is Y, N or H, X22 is T or A, X23 is Q or K, X24 is V or M, X25 is S or G, X26 is K, V, N or R, X27 is A, D, R, Y, S, W or H, X28 is Y, S, P, Gr or T, X29 is S, K, or G, X30 is A, V, D, K, or, T; X31 is A, D, K, S, G, or H; X32 is Y,G, or E, X33 is K, I, or N, X34 is A,S, or N, X35 is S, Q, or G, X36 is S or K, X37 is F or V, X38 is Q or K, X39 is F or V, X40 is I or M, X41 is T or S, X42 is V,I or R, X43 is T, K or N, X44 is T, A, S or K, X45 is S or N, X46 is A, V or L, X47 is L or M, X48 is Q or E, X49 is L or M, X50 is S or N, X51 is S or R, X52 is T or R, X53 is A or S, X54 is G, D or E; X55 is T or S, X56 is T, K, or R, X57 is S, Q, W, or R, X58 is D, or G, X59 is Y, P, or R; X60 is F,S,G,N or T, X61 is Y, A, or H, X62 is A,-, or V, X63 is F or M, X64 is Y or V; X65 is T,L or M; and a VL region of SEQ ID NO 1161, wherein X1 is D or E; X2 is Q or V; X3 is L, M; X4 is A,S or D; X5 is F,S or T; X6 is A or S; X7 is A or V; X8 is P,V or L; X9 is D or E; X10 is A or V; X11 is I or L; X12 is T, S, or N; X13 is K or R; X14 is A, S; or X15 is Q,D,S,G or E; X16 is S, D or N; X17 is V, I or L; X18 is K, Y, S or H; X19 is S or N; X20 is F, L or M; X21 is A, N or H; X22 is K or Q; X23 is A, P or V; X24 is K or R; X25 is I or V; X26 is Y, G, W or N; X27 is T or A; X28 is S or K; X29 is T, N or R; X30 is L or R; X31 is E, A, V or H; X32 is S or E; X33 is A, S, V or D; X34 is D or E; X35 is T or K; X36 is S or R; X37 is A,S or P; X38 is F or V; X39 is A,G; X40 is T or V; X41 is Q or V; X42 is Q, N, H; X43 is F, L, Y, W, N or H; X44 is A, D, Y, S or N; X45 is Q, R, S, G, W or M; X46 is F, Y or T; X47 is F, Y or L; X48 is V or L; and X49 is D or E.

40. The antigen-binding molecule of claim 1, wherein the first binding domain and/or the third binding domain bind to MSLN and comprise a VH region of SEQ ID NO: 1165, X1 is E or Q; X2 is V, L or Q; X3 is E or Q; X4 is A,G or P; X5 is E or G; X6 is V or L; X7 is V or K; X8 is K or Q; X9 is G or S; X10 is E, A, G or R; X11 is S or T; X12 is V or L; X13 is R, S or K; X14 is V or L; X15 is S or T; X16 is A,K or T; X17 is A or V; X18 is Y, I or F; X19 is S or T; X20 is S or F; X21 is S or T; X22 is D, G or S; X23 is Y, G, A or F; X24 is I, W or M; X25 is G, S, V, T or H; X26 is I or V; X27 is A or P; X28 is M, K or Q; X29 is G or C; X30 is I, M, V or L; X31 is A, G or S; X32 is A, S, N, W, Y or V; X33 is Y, S or N; X34 is Y, G, P or S; X35 is D, H, S or N; X36 is G or S; X37 is E, G or S; X38 is G, S, N, F, T or Q; X39 is S, K, W, D, I, or T; X40 is Y or N; X41 is A or N; X42 is A, P, N, E, D, I or Q; X43 is D, A, S or K; X44 is V,L or F; X45 is K,Q; X46 is G or S; X47 is V or F; X48 is I or M; X49 is S or T; X50 is R or V; X51 is N or T; X52 is A or S; X53 is I or K; X54 is S or N; X55 is S, T or Q; X56 is A, L or F; X57 is Y, S or F; X58 is L or M; X59 is E, K or Q; X60 is M or L; X61 is S or N; X62 is R or S; X63 is V or L; X64 is R or T; X65 is A or S; X66 is D, A or E; X67 is R or K; X68 is D, E, V or L; X69 is E, R, G or P; X70 is R, A, Nor Y; X71 is G, S, Y, V or H; X72 is A, P, F, D or Y; X73 is R or G; X74 is M, R, S or D; X75 is E or G; X76 is Y or L; X77 is Y or F; X78 is Y, S or F; X79 is A, G, S, T or H; X80 is L, M or F; X81 is Y, I or V; and X82 is L, M or T; and a VL region of SEQ ID NO 1169 X1 is E,S or D; X2 is Y,I or L; X3 is E, V or T; X4 is V,L or M; X5 is P or S; X6 is G or S; X7 is S or T; X8 is V or L; X9 is A, V or L; X10 is P or V; X11 is E, Q or D; X12 is R or T; X13 is A or V; X14 is S or T; X15 is I or L; X16 is S or T; X17 is A or S; X18 is G or S; X19 is E or Q; X20 is G,S or K; X21 is I, V, L or F; X22 is R, G or S; X23 is D or S; X24 is A, S, N, K or T; X25 is Y, W or M; X26 is V or L; X27 is Y or A; X28 is K or Q; X29 is A,S or V; X30 is R,V or K; X31 is V or L; X32 is A,G or Q; X33 is A or S; X34 is S or T; X35 is G,S,K,I or T; X36 is R or L; X37 is A, P or Q; X38 is S or T; X39 is I or V; X40 is E,S or D; X41 is G or N; X42 is N or T; X43 is D or T; X44 is A or F; X45 is R,G or S; X46 is L or T; X47 is E or Q; X48 is A or P; X49 is E or M; X50 is E or F; X51 is D, V or T; X52 is A or Q; X53 is Y,S,A or T; X54 is G,E, Y,H or Q; X55 is A or S; X56 is S,T or F; X57 is P or T; X58 is R, A, L or F; X59 is V or T; X60 is P or C; X61 is V or L; X62 is E or T; X63 is I or V; and X64 is L or K.

41. The antigen-binding molecule of claim 1, wherein the first and/or the third (target) binding domain comprise a VH region comprising CDR-H 1, CDR-H2 and CDR-H3 selected from SEQ ID NO: 77 to 79, 86 to 88, 95 to 97, 103 to 105, 111 to 113, 119 to 121, 127 to 129, 135 to 137, 143 to 145, 151 to 153, 159 to 161, 168 to 170, 177 to 179, 185 to 187, 194 to 196, 203 to 205, 212 to 214, 221 to 223, 230 to 232, 238 to 240, 334 to 336, 356 to 358, 365 to 367, 376 to 378, 385 to 387 and 194, 432 and 196, 446 to 448, 454 to 456, 462 to 464, 470 to 472, 478 to 480, 486 to 488, 494 to 496, 502 to 504, 510 to 512, 518 to 520, 526 to 528, 534 to 536, 542 to 544, 550 to 552, 558 to 560, 566 to 568, 574 to 576, 582 to 584, 590 to 592, 598 to 600, 606 to 608, 614 to 616, 622 to 624, 630 to 632, 638 to 640, 646 to 648, 654 to 656, 662 to 664, 670 to 672, 678 to 680, 686 to 688, 694 to 696, 702 to 704, 710 to 712, 718 to 720, 726 to 728, 734 to 736, 742 to 744, 750 to 752, 758 to 760, 766 to 768, 774 to 776, 782 to 784, 790 to 792, 798 to 800, 806 to 808, 814 to 816, 822 to 826, 830 to 832, 838 to 840, 846 to 848, 854 to 856, 862 to 864, 870 to 872, 878 to 880, 886 to 888, 894 to 896, 902 to 904, 910 to 912, 918 to 920, 926 to 928, 934 to 936, 942 to 944, 950 to 952, 958 to 960, 966 to 968, 974 to 976, 982 to 984, 990 to 992, 998 to 1000, 1006 to 1008, 1014 to 1016, 1022 to 1024, 1030 to 1032, 1038 to 1040, 1046 to 1048, 1054 to 1056, and 1062 to 1064, or any combination of CDR-H 1, CDR-H2 and CDR-H3 as disclosed together in Table 52.

42. The antigen-binding molecule of claim 1, wherein the first binding domain and/or third binding domain comprise a VL region comprising CDR-L1, CDR-L2 and CDR-L3 selected from SEQ ID NO: 80 to 82, 89 to 91, 98 to 100, 106 to 108, 114 to 116, 122 to 124, 130 to 132, 138 to 140, 146 to 148, 154 to 156, 162 to 164, 171 to 173, 180 to 182, 188 to 190, 197 to 199, 206 to 208, 215 to 217, 224 to 226, 233 to 235, 241 to 243, 337 to 339, 359 to 361, 368 to 370, 379 to 381, 388 to 390, 449 to 451, 457 to 459, 465 to 467, 473 to 475, 481 to 483, 489 to 491, 497 to 499, 505 to 507, 513 to 515, 521 to 523, 529 to 531, 537 to 539, 545 to 547, 553 to 555, 561 to 563, 569 to 571, 577 to 579, 585 to 587, 593 to 595, 601 to 603, 609 to 611, 617 to 619, 625 to 627, 633 to 635, 641 to 643, 649 to 651, 657 to 659, 665 to 667, 673 to 675, 681 to 683, 689 to 691, 697 to 699, 705 to 707, 713 to 715, 721 to 723, 729 to 731, 737 to 739, 745 to 747, 753 to 755, 761 to 763, 769 to 771, 777 to 779, 785 to 787, 793 to 795, 801 to 803, 809 to 811, 817 to 819, 825 to 829, 833 to 835, 841 to 843, 849 to 851, 857 to 859, 865 to 867, 873 to 875, 881 to 883, 889 to 891, 897 to 899, 905 to 907, 913 to 915, 921 to 923, 929 to 931, 937 to 939, 945 to 947, 953 to 955, 961 to 963, 969 to 971, 977 to 979, 985 to 987, 993 to 995, 1001 to 1003, 1009 to 1011, 1017 to 1019, 1025 to 1027, 1033 to 1035, 1041 to 1043, 1049 to 1051, 1057 to 1059, and 1065 to 1067 or any combination of CDR-L 1, CDR-L2 and CDR-L3 as disclosed together in the sequence table Tab. 52.

43. The antigen-binding molecule of claim 1, wherein the first binding domain and/or third binding domain comprise a VH region selected from SEQ ID NO: 83, 92, 101, 109, 117, 125, 133, 141, 149, 157, 165, 174, 183, 191, 200, 209, 218, 227, 236, 244, 340, 362, 371, 382, 391, and 433, 452, 460, 468, 476, 484, 492, 500, 508, 516, 524, 532, 540, 548, 556, 564, 572, 580, 588, 596, 604, 612, 620, 628, 636, 644, 652, 660, 668, 676, 684, 692, 700, 708, 716, 724, 732, 740, 748, 756, 764, 772, 780, 788, 796, 804, 812, 820, 828, 836, 844, 852, 860, 868, 876, 884, 892, 900, 908, 916, 924, 932, 940, 948, 956, 964, 972, 980, 988, 996, 1004, 1012, 1020, 1028, 1036, 1044, 1052, 1060, and 1068 or any VH as disclosed together in Table 52.

44. The antigen-binding molecule of claim 1, wherein the first binding domain and/or third binding domain comprises a VL region selected from SEQ ID NO: 84, 93, 102, 110, 118, 126, 134, 142, 150, 158, 166, 175, 184, 192, 201, 210, 219, 228, 237, 245, 341, 363, 372, 383, 392, 453, 461, 469, 477, 485, 493, 501, 509, 517, 525, 533, 541, 549, 557, 565, 573, 581, 589, 597, 605, 613, 621, 629, 637, 645, 653, 661, 669, 677, 685, 693, 701, 709, 717, 725, 733, 741, 749, 757, 765, 773, 781, 789, 797, 805, 813, 821, 829, 837, 845, 853, 861, 869, 877, 885, 893, 901, 909, 917, 925, 933, 941, 949, 957, 965, 973, 981, 989, 997, 1005, 1013, 1021, 1029, 1037, 1045, 1053, 1061, and 1069 or any VL as disclosed together in Table 52.

45. The antigen-binding molecule of claim 1, wherein the first binding domain and/or third binding domain comprises a VL region of increased stability by a single amino acid exchange (E to I), selected from SEQ ID NO: 85, 94, 193, 202, 211, 220, 229, 364, 384, 393.

46. The antigen-binding molecule of claim 1 comprising an amino acid sequence selected from the group consisting of SEQ ID NOs: 246 to 323, 330 to 332, 351 to 355, 373 to 375, 394 to 410, 434, 1073, 1075 to 1080, or any other full length multitargeting bispecific antigen-binding molecule as disclosed in Table 52.

47. A polynucleotide encoding the antigen-binding molecule of claim 1.

48. A vector comprising the polynucleotide of claim 47.

49. A host cell transformed or transfected with the polynucleotide of claim 47.

50. A process for producing an antigen-binding molecule, said process comprising culturing the host cell of claim 49 under conditions allowing the expression of the antigen-binding molecule and recovering the antigen-binding molecule from the culture.

51. A pharmaceutical composition comprising the antigen-binding molecule of claim 1.

52-54. (canceled)

55. A method for treating or ameliorating a proliferative disease, a tumorous disease, a cancer or an immunological disorder, the method comprising administering to a subject in need thereof the antigen binding molecule of claim 1.

56-57. (canceled)

58. The method of claim 55, wherein the disease is acute myeloid leukemia (AML), non-Hodgkin lymphoma (NHL), non-small-cell lung carcinoma (NSCLC), pancreatic cancer or colorectal cancer (CRC).

59. (canceled)

60. A kit comprising the antigen-binding molecule of claim 1 and instructions for use.

The application's sequence listing, which the Patent Office published only in electronic form, follows.

SEQUENCE LISTING (1183 sequences)

SEQ ID NO: 1 - protein, 15 aa, Artificial Sequence
  Synthetic
GGGGQGGGGQGGGGQ

SEQ ID NO: 2 - protein, 50 aa, Artificial Sequence
  Synthetic
GGGGSGGGGSGGGGSGGGGSGGGGSGGGGSGGGGSGGGGSGGGGSGGGGS

SEQ ID NO: 3 - protein, 15 aa, Artificial Sequence
  Synthetic
GGGGSGGGGSGGGGS

SEQ ID NO: 4 - protein, 51 aa, Artificial Sequence
  Synthetic
GEAAAKEAAAKEAAAKEAAAKEAAAKEAAAKEAAAKEAAAKEAAAKEAAAK

SEQ ID NO: 5 - protein, 4 aa, Artificial Sequence
  Synthetic
GGGG

SEQ ID NO: 6 - protein, 5 aa, Artificial Sequence
  Synthetic
GGGGQ

SEQ ID NO: 7 - protein, 5 aa, Artificial Sequence
  Synthetic
GGGGS

SEQ ID NO: 8 - protein, 51 aa, Artificial Sequence
  Synthetic
SGGGGSGGGGSGGGGSGGGGSGGGGSGGGGSGGGGSGGGGSGGGGSGGGGS

SEQ ID NO: 9 - protein, 16 aa, Artificial Sequence
  Synthetic
SGGGGSGGGGSGGGGS

SEQ ID NO: 10 - protein, 52 aa, Artificial Sequence
  Synthetic
SGEAAAKEAAAKEAAAKEAAAKEAAAKEAAAKEAAAKEAAAKEAAAKEAAAK

SEQ ID NO: 11 - protein, 6 aa, Artificial Sequence
  Synthetic
SGGGGQ

SEQ ID NO: 12 - protein, 6 aa, Artificial Sequence
  Synthetic
SGGGGS

SEQ ID NO: 13 - protein, 50 aa, Artificial Sequence
  Synthetic
EAAAKEAAAKEAAAKEAAAKEAAAKEAAAKEAAAKEAAAKEAAAKEAAAK

SEQ ID NO: 14 - protein, 50 aa, Artificial Sequence; identical to SEQ ID NO: 2
  Synthetic

SEQ ID NO: 15 - protein, 585 aa, Artificial Sequence [sequence omitted]

SEQ ID NO: 16 - protein, 143 aa, Artificial Sequence
  Synthetic
LDSPDRPWNPPTFSPALLVVTEGDNATFTCSFSNTSESFVLNWYRMSPSNQTDKLAAFPEDRSQPGQDCRFRVTQLPNGRDFHMSVVRARRNDSGTYLCGAISLAPKAQIKESLRAELRVTERRAEVPTAHPSPSPRPAGQFQ

SEQ ID NO: 17 - protein, 227 aa, Artificial Sequence
  Synthetic
DKTHTCPPCPAPELLGGPSVFLFPPKPKDTLMISRTPEVTCVVVDVSHEDPEVKFNWYVDGVEVHNAKTKPCEEQYGSTYRCVSVLTVLHQDWLNGKEYKCKVSNKALPAPIEKTISKAKGQPREPQVYTLPPSREEMTKNQVSLTCLVKGFYPSDIAVEWESNGQPENNYKTTPPVLDSDGSFFLYSKLTVDKSRWQQGNVFSCSVMHEALHNHYTQKSLSLSPGK

SEQ ID NO: 18 - protein, 225 aa, Artificial Sequence
  Synthetic
DKTHTCPPCPAPELLGGPSVFLFPPKPKDTLMISRTPEVTCVVVDVSHEDPEVKFNWYVDGVEVHNAKTKPCEEQYGSTYRCVSVLTVLHQDWLNGKEYKCKVSNKALPAPIEKTISKAKGQPREPQVYTLPPSREEMTKNQVSLTCLVKGFYPSDIAVEWESNGQPENNYKTTPPVLDSDGSFFLYSKLTVDKSRWQQGNVFSCSVMHEALHNHYTQKSLSLSP

SEQ ID NO: 19 - protein, 227 aa, Artificial Sequence
  Synthetic
DKTHTCPPCPAPELLGGPSVFLFPPKPKDTLMISRTPEVTCVVVDVSHEDPEVKFNWYVDGVEVHNAKTKPREEQYNSTYRVVSVLTVLHQDWLNGKEYKCKVSNKALPAPIEKTISKAKGQPREPQVYTLPPSREEMTKNQVSLTCLVKGFYPSDIAVEWESNGQPENNYKTTPPVLDSDGSFFLYSKLTVDKSRWQQGNVFSCSVMHEALHNHYTQKSLSLSPGK

SEQ ID NO: 20 - protein, 225 aa, Artificial Sequence
  Synthetic
DKTHTCPPCPAPELLGGPSVFLFPPKPKDTLMISRTPEVTCVVVDVSHEDPEVKFNWYVDGVEVHNAKTKPREEQYNSTYRVVSVLTVLHQDWLNGKEYKCKVSNKALPAPIEKTISKAKGQPREPQVYTLPPSREEMTKNQVSLTCLVKGFYPSDIAVEWESNGQPENNYKTTPPVLDSDGSFFLYSKLTVDKSRWQQGNVFSCSVMHEALHNHYTQKSLSLSP

SEQ ID NO: 21 - protein, 227 aa, Artificial Sequence
  Synthetic
DKTHTCPPCPAPELLGGPSVFLFPPKPKDTLMISRTPEVTCVVVDVSHEDPEVKFNWYVDGVEVHNAKTKPREEQYGSTYRVVSVLTVLHQDWLNGKEYKCKVSNKALPAPIEKTISKAKGQPREPQVYTLPPSREEMTKNQVSLTCLVKGFYPSDIAVEWESNGQPENNYKTTPPVLDSDGSFFLYSKLTVDKSRWQQGNVFSCSVMHEALHNHYTQKSLSLSPGK

SEQ ID NO: 22 - protein, 225 aa, Artificial Sequence
  Synthetic
DKTHTCPPCPAPELLGGPSVFLFPPKPKDTLMISRTPEVTCVVVDVSHEDPEVKFNWYVDGVEVHNAKTKPREEQYGSTYRVVSVLTVLHQDWLNGKEYKCKVSNKALPAPIEKTISKAKGQPREPQVYTLPPSREEMTKNQVSLTCLVKGFYPSDIAVEWESNGQPENNYKTTPPVLDSDGSFFLYSKLTVDKSRWQQGNVFSCSVMHEALHNHYTQKSLSLSP

SEQ ID NO: 23 - protein, 227 aa, Artificial Sequence
  Synthetic
DKTHTCPPCPAPELLGGPSVFLFPPKPKDTLMISRTPEVTCVVVDVSHEDPEVKFNWYVDGVEVHNAKTKPCEEQYNSTYRCVSVLTVLHQDWLNGKEYKCKVSNKALPAPIEKTISKAKGQPREPQVYTLPPSREEMTKNQVSLTCLVKGFYPSDIAVEWESNGQPENNYKTTPPVLDSDGSFFLYSKLTVDKSRWQQGNVFSCSVMHEALHNHYTQKSLSLSPGK

SEQ ID NO: 24 - protein, 225 aa, Artificial Sequence
  Synthetic
DKTHTCPPCPAPELLGGPSVFLFPPKPKDTLMISRTPEVTCVVVDVSHEDPEVKFNWYVDGVEVHNAKTKPCEEQYNSTYRCVSVLTVLHQDWLNGKEYKCKVSNKALPAPIEKTISKAKGQPREPQVYTLPPSREEMTKNQVSLTCLVKGFYPSDIAVEWESNGQPENNYKTTPPVLDSDGSFFLYSKLTVDKSRWQQGNVFSCSVMHEALHNHYTQKSLSLSP

SEQ ID NO: 25 - protein, 484 aa, Artificial Sequence
  Synthetic
DKTHTCPPCPAPELLGGPSVFLFPPKPKDTLMISRTPEVTCVVVDVSHEDPEVKFNWYVDGVEVHNAKTKPCEEQYGSTYRCVSVLTVLHQDWLNGKEYKCKVSNKALPAPIEKTISKAKGQPREPQVYTLPPSREEMTKNQVSLTCLVKGFYPSDIAVEWESNGQPENNYKTTPPVLDSDGSFFLYSKLTVDKSRWQQGNVFSCSVMHEALHNHYTQKSLSLSPGKGGGGSGGGGSGGGGSGGGGSGGGGSGGGGSDKTHTCPPCPAPELLGGPSVFLFPPKPKDTLMISRTPEVTCVVVDVSHEDPEVKFNWYVDGVEVHNAKTKPCEEQYGSTYRCVSVLTVLHQDWLNGKEYKCKVSNKALPAPIEKTISKAKGQPREPQVYTLPPSREEMTKNQVSLTCLVKGFYPSDIAVEWESNGQPENNYKTTPPVLDSDGSFFLYSKLTVDKSRWQQGNVFSCSVMHEALHNHYTQKSLSLSPGK

SEQ ID NO: 26 - protein, 480 aa, Artificial Sequence
  Synthetic
DKTHTCPPCPAPELLGGPSVFLFPPKPKDTLMISRTPEVTCVVVDVSHEDPEVKFNWYVDGVEVHNAKTKPCEEQYGSTYRCVSVLTVLHQDWLNGKEYKCKVSNKALPAPIEKTISKAKGQPREPQVYTLPPSREEMTKNQVSLTCLVKGFYPSDIAVEWESNGQPENNYKTTPPVLDSDGSFFLYSKLTVDKSRWQQGNVFSCSVMHEALHNHYTQKSLSLSPGGGGSGGGGSGGGGSGGGGSGGGGSGGGGSDKTHTCPPCPAPELLGGPSVFLFPPKPKDTLMISRTPEVTCVVVDVSHEDPEVKFNWYVDGVEVHNAKTKPCEEQYGSTYRCVSVLTVLHQDWLNGKEYKCKVSNKALPAPIEKTISKAKGQPREPQVYTLPPSREEMTKNQVSLTCLVKGFYPSDIAVEWESNGQPENNYKTTPPVLDSDGSFFLYSKLTVDKSRWQQGNVFSCSVMHEALHNHYTQKSLSLSP

SEQ ID NO: 27 - protein, 484 aa, Artificial Sequence
  Synthetic
DKTHTCPPCPAPELLGGPSVFLFPPKPKDTLMISRTPEVTCVVVDVSHEDPEVKFNWYVDGVEVHNAKTKPREEQYNSTYRVVSVLTVLHQDWLNGKEYKCKVSNKALPAPIEKTISKAKGQPREPQVYTLPPSREEMTKNQVSLTCLVKGFYPSDIAVEWESNGQPENNYKTTPPVLDSDGSFFLYSKLTVDKSRWQQGNVFSCSVMHEALHNHYTQKSLSLSPGKGGGGSGGGGSGGGGSGGGGSGGGGSGGGGSDKTHTCPPCPAPELLGGPSVFLFPPKPKDTLMISRTPEVTCVVVDVSHEDPEVKFNWYVDGVEVHNAKTKPREEQYNSTYRVVSVLTVLHQDWLNGKEYKCKVSNKALPAPIEKTISKAKGQPREPQVYTLPPSREEMTKNQVSLTCLVKGFYPSDIAVEWESNGQPENNYKTTPPVLDSDGSFFLYSKLTVDKSRWQQGNVFSCSVMHEALHNHYTQKSLSLSPGK

SEQ ID NO: 28 - protein, 480 aa, Artificial Sequence
  Synthetic
DKTHTCPPCPAPELLGGPSVFLFPPKPKDTLMISRTPEVTCVVVDVSHEDPEVKFNWYVDGVEVHNAKTKPREEQYNSTYRVVSVLTVLHQDWLNGKEYKCKVSNKALPAPIEKTISKAKGQPREPQVYTLPPSREEMTKNQVSLTCLVKGFYPSDIAVEWESNGQPENNYKTTPPVLDSDGSFFLYSKLTVDKSRWQQGNVFSCSVMHEALHNHYTQKSLSLSPGGGGSGGGGSGGGGSGGGGSGGGGSGGGGSDKTHTCPPCPAPELLGGPSVFLFPPKPKDTLMISRTPEVTCVVVDVSHEDPEVKFNWYVDGVEVHNAKTKPREEQYNSTYRVVSVLTVLHQDWLNGKEYKCKVSNKALPAPIEKTISKAKGQPREPQVYTLPPSREEMTKNQVSLTCLVKGFYPSDIAVEWESNGQPENNYKTTPPVLDSDGSFFLYSKLTVDKSRWQQGNVFSCSVMHEALHNHYTQKSLSLSP

SEQ ID NO: 29 - protein, 484 aa, Artificial Sequence
  Synthetic
DKTHTCPPCPAPELLGGPSVFLFPPKPKDTLMISRTPEVTCVVVDVSHEDPEVKFNWYVDGVEVHNAKTKPREEQYGSTYRVVSVLTVLHQDWLNGKEYKCKVSNKALPAPIEKTISKAKGQPREPQVYTLPPSREEMTKNQVSLTCLVKGFYPSDIAVEWESNGQPENNYKTTPPVLDSDGSFFLYSKLTVDKSRWQQGNVFSCSVMHEALHNHYTQKSLSLSPGKGGGGSGGGGSGGGGSGGGGSGGGGSGGGGSDKTHTCPPCPAPELLGGPSVFLFPPKPKDTLMISRTPEVTCVVVDVSHEDPEVKFNWYVDGVEVHNAKTKPREEQYGSTYRVVSVLTVLHQDWLNGKEYKCKVSNKALPAPIEKTISKAKGQPREPQVYTLPPSREEMTKNQVSLTCLVKGFYPSDIAVEWESNGQPENNYKTTPPVLDSDGSFFLYSKLTVDKSRWQQGNVFSCSVMHEALHNHYTQKSLSLSPGK

SEQ ID NO: 30 - protein, 480 aa, Artificial Sequence
  Synthetic
DKTHTCPPCPAPELLGGPSVFLFPPKPKDTLMISRTPEVTCVVVDVSHEDPEVKFNWYVDGVEVHNAKTKPREEQYGSTYRVVSVLTVLHQDWLNGKEYKCKVSNKALPAPIEKTISKAKGQPREPQVYTLPPSREEMTKNQVSLTCLVKGFYPSDIAVEWESNGQPENNYKTTPPVLDSDGSFFLYSKLTVDKSRWQQGNVFSCSVMHEALHNHYTQKSLSLSPGGGGSGGGGSGGGGSGGGGSGGGGSGGGGSDKTHTCPPCPAPELLGGPSVFLFPPKPKDTLMISRTPEVTCVVVDVSHEDPEVKFNWYVDGVEVHNAKTKPREEQYGSTYRVVSVLTVLHQDWLNGKEYKCKVSNKALPAPIEKTISKAKGQPREPQVYTLPPSREEMTKNQVSLTCLVKGFYPSDIAVEWESNGQPENNYKTTPPVLDSDGSFFLYSKLTVDKSRWQQGNVFSCSVMHEALHNHYTQKSLSLSP

SEQ ID NO: 31 - protein, 484 aa, Artificial Sequence
  Synthetic
DKTHTCPPCPAPELLGGPSVFLFPPKPKDTLMISRTPEVTCVVVDVSHEDPEVKFNWYVDGVEVHNAKTKPCEEQYNSTYRCVSVLTVLHQDWLNGKEYKCKVSNKALPAPIEKTISKAKGQPREPQVYTLPPSREEMTKNQVSLTCLVKGFYPSDIAVEWESNGQPENNYKTTPPVLDSDGSFFLYSKLTVDKSRWQQGNVFSCSVMHEALHNHYTQKSLSLSPGKGGGGSGGGGSGGGGSGGGGSGGGGSGGGGSDKTHTCPPCPAPELLGGPSVFLFPPKPKDTLMISRTPEVTCVVVDVSHEDPEVKFNWYVDGVEVHNAKTKPCEEQYNSTYRCVSVLTVLHQDWLNGKEYKCKVSNKALPAPIEKTISKAKGQPREPQVYTLPPSREEMTKNQVSLTCLVKGFYPSDIAVEWESNGQPENNYKTTPPVLDSDGSFFLYSKLTVDKSRWQQGNVFSCSVMHEALHNHYTQKSLSLSPGK

SEQ ID NO: 32 - protein, 480 aa, Artificial Sequence
  Synthetic
DKTHTCPPCPAPELLGGPSVFLFPPKPKDTLMISRTPEVTCVVVDVSHEDPEVKFNWYVDGVEVHNAKTKPCEEQYNSTYRCVSVLTVLHQDWLNGKEYKCKVSNKALPAPIEKTISKAKGQPREPQVYTLPPSREEMTKNQVSLTCLVKGFYPSDIAVEWESNGQPENNYKTTPPVLDSDGSFFLYSKLTVDKSRWQQGNVFSCSVMHEALHNHYTQKSLSLSPGGGGSGGGGSGGGGSGGGGSGGGGSGGGGSDKTHTCPPCPAPELLGGPSVFLFPPKPKDTLMISRTPEVTCVVVDVSHEDPEVKFNWYVDGVEVHNAKTKPCEEQYNSTYRCVSVLTVLHQDWLNGKEYKCKVSNKALPAPIEKTISKAKGQPREPQVYTLPPSREEMTKNQVSLTCLVKGFYPSDIAVEWESNGQPENNYKTTPPVLDSDGSFFLYSKLTVDKSRWQQGNVFSCSVMHEALHNHYTQKSLSLSP

SEQ ID NO: 33 - protein, 474 aa, Artificial Sequence
  Synthetic
CPPCPAPELLGGPSVFLFPPKPKDTLMISRTPEVTCVVVDVSHEEPEVKFNWYVDGVEVHNAKTKPCEEQYGSTYRCVSVLTVLHQDWLNGKEYKCKVSNKALPAPIEKTISKAKGQPREPQVYTLPPSREEMTKNQVSLTCLVKGFYPSDIAVEWESNGQPENNYKTTPPVLDSDGSFFLYSKLTVDKSRWQQGNVFSCSVMHEALHNHYTQKSLSLSPGKGGGGQGGGGQGGGGQGGGGQGGGGQGGGGQCPPCPAPELLGGPSVFLFPPKPKDTLMISRTPEVTCVVVDVSHEEPEVKFNWYVDGVEVHNAKTKPCEEQYGSTYRCVSVLTVLHQDWLNGKEYKCKVSNKALPAPIEKTISKAKGQPREPQVYTLPPSREEMTKNQVSLTCLVKGFYPSDIAVEWESNGQPENNYKTTPPVLDSDGSFFLYSKLTVDKSRWQQGNVFSCSVMHEALHNHYTQKSLSLSPGK

SEQ ID NO: 34 - protein, 968 aa, Artificial Sequence
  Synthetic
DKTHTCPPCPAPELLGGPSVFLFPPKPKDTLMISRTPEVTCVVVDVSHEDPEVKFNWYVDGVEVHNAKTKPCEEQYGSTYRCVSVLTVLHQDWLNGKEYKCKVSNKALPAPIEKTISKAKGQPREPQVYTLPPSREEMTKNQVSLTCLVKGFYPSDIAVEWESNGQPENNYKTTPPVLDSDGSFFLYSKLTVDKSRWQQGNVFSCSVMHEALHNHYTQKSLSLSPGKGGGGSGGGGSGGGGSGGGGSGGGGSGGGGSDKTHTCPPCPAPELLGGPSVFLFPPKPKDTLMISRTPEVTCVVVDVSHEDPEVKFNWYVDGVEVHNAKTKPCEEQYGSTYRCVSVLTVLHQDWLNGKEYKCKVSNKALPAPIEKTISKAKGQPREPQVYTLPPSREEMTKNQVSLTCLVKGFYPSDIAVEWESNGQPENNYKTTPPVLDSDGSFFLYSKLTVDKSRWQQGNVFSCSVMHEALHNHYTQKSLSLSPGKDKTHTCPPCPAPELLGGPSVFLFPPKPKDTLMISRTPEVTCVVVDVSHEDPEVKFNWYVDGVEVHNAKTKPCEEQYGSTYRCVSVLTVLHQDWLNGKEYKCKVSNKALPAPIEKTISKAKGQPREPQVYTLPPSREEMTKNQVSLTCLVKGFYPSDIAVEWESNGQPENNYKTTPPVLDSDGSFFLYSKLTVDKSRWQQGNVFSCSVMHEALHNHYTQKSLSLSPGKGGGGSGGGGSGGGGSGGGGSGGGGSGGGGSDKTHTCPPCPAPELLGGPSVFLFPPKPKDTLMISRTPEVTCVVVDVSHEDPEVKFNWYVDGVEVHNAKTKPCEEQYGSTYRCVSVLTVLHQDWLNGKEYKCKVSNKALPAPIEKTISKAKGQPREPQVYTLPPSREEMTKNQVSLTCLVKGFYPSDIAVEWESNGQPENNYKTTPPVLDSDGSFFLYSKLTVDKSRWQQGNVFSCSVMHEALHNHYTQKSLSLSPGK

SEQ ID NO: 35 - protein, 227 aa, Artificial Sequence
  Synthetic
DKTHTCPPCPAPELLGGPSVFLFPPKPKDTLMISRTPEVTCVVVDVSHEDPEVKFNWYVDGVEVHNAKTKPCEEQYGSTYRCVSVLTVLHQDWLNGKEYKCKVSNKALPAPIEKTISKAKGQPREPQVYTLPPSREEMTKNQVSLTCLVKGFYPSDIAVEWESNGQPENNYDTTPPVLDSDGSFFLYSDLTVDKSRWQQGNVFSCSVMHEALHNHYTQDSLSLSPGK

SEQ ID NO: 36 - protein, 227 aa, Artificial Sequence
  Synthetic
DKTHTCPPCPAPELLGGPSVFLFPPKPKDTLMISRTPEVTCVVVDVSHEDPEVKFNWYVDGVEVHNAKTKPCEEQYGSTYRCVSVLTVLHQDWLNGKEYKCKVSNKALPAPIEKTISKAKGQPREPQVYTLPPSRKEMTKNQVSLTCLVKGFYPSDIAVEWESNGQPENNYKTTPPVLKSDGSFFLYSKLTVDKSRWQQGNVFSCSVMHEALHNHYTQKSLSLSPGK

SEQ ID NO: 37 - protein, 5 aa, Artificial Sequence
  Synthetic
KYAMN

SEQ ID NO: 38 - protein, 19 aa, Artificial Sequence
  Synthetic
RIRSKYNNYATYYADSVKD

SEQ ID NO: 39 - protein, 14 aa, Artificial Sequence
  Synthetic
HGNFGNSYISYWAY

SEQ ID NO: 40 - protein, 14 aa, Artificial Sequence
  Synthetic
GSSTGAVTSGNYPN

SEQ ID NO: 41 - protein, 7 aa, Artificial Sequence
  Synthetic
GTKFLAP

SEQ ID NO: 42 - protein, 9 aa, Artificial Sequence
  Synthetic
VLWYSNRWV

SEQ ID NO: 43 - protein, 125 aa, Artificial Sequence
  Synthetic
EVQLVESGGGLVQPGGSLKLSCAASGFTFNKYAMNWVRQAPGKGLEWVARIRSKYNNYATYYADSVKDRFTISRDDSKNTAYLQMNNLKTEDTAVYYCVRHGNFGNSYISYWAYWGQGTLVTVSS

SEQ ID NO: 44 - protein, 109 aa, Artificial Sequence
  Synthetic
QTVVTQEPSLTVSPGGTVTLTCGSSTGAVTSGNYPNWVQQKPGQAPRGLIGGTKFLAPGTPARFSGSLLGGKAALTLSGVQPEDEAEYYCVLWYSNRWVFGGGTKLTVL

SEQ ID NO: 45 - protein, 5 aa, Artificial Sequence
  Synthetic
KYAMN

SEQ ID NO: 46 - protein, 19 aa, Artificial Sequence
  Synthetic
RIRSKYNNYATYYADSVKD

SEQ ID NO: 47 - protein, 14 aa, Artificial Sequence
  Synthetic
HGNFGNSYISYWAY

SEQ ID NO: 48 - protein, 14 aa, Artificial Sequence
  Synthetic
GSSTGAVTSGNYPN

SEQ ID NO: 49 - protein, 7 aa, Artificial Sequence
  Synthetic
GTKFLAP

SEQ ID NO: 50 - protein, 9 aa, Artificial Sequence
  Synthetic
VLWYSNRWV

SEQ ID NO: 51 - protein, 125 aa, Artificial Sequence
  Synthetic
EVQLVESGGGLVQPGGSLKLSCAASGFTFNKYAMNWVRQAPGKCLEWVARIRSKYNNYATYYADSVKDRFTISRDDSKNTAYLQMNNLKTEDTAVYYCVRHGNFGNSYISYWAYWGQGTLVTVSS

SEQ ID NO: 52 - protein, 109 aa, Artificial Sequence
  Synthetic
QTVVTQEPSLTVSPGGTVTLTCGSSTGAVTSGNYPNWVQQKPGQAPRGLIGGTKFLAPGTPARFSGSLLGGKAALTLSGVQPEDEAEYYCVLWYSNRWVFGCGTKLTVL

SEQ ID NO: 53 - protein, 5 aa, Artificial Sequence
  Synthetic
KYAIN

SEQ ID NO: 54 - protein, 19 aa, Artificial Sequence
  Synthetic
RIRSKYNNYATYYADAVKD

SEQ ID NO: 55 - protein, 14 aa, Artificial Sequence
  Synthetic
AGNFGSSYISYWAY

SEQ ID NO: 56 - protein, 14 aa, Artificial Sequence
  Synthetic
GSSTGAVTSGNYPN

SEQ ID NO: 57 - protein, 7 aa, Artificial Sequence
  Synthetic
GTKFLAP

SEQ ID NO: 58 - protein, 9 aa, Artificial Sequence
  Synthetic
VLWYSNRWV

SEQ ID NO: 59 - protein, 125 aa, Artificial Sequence
  Synthetic
EVQLVESGGGLVQPGGSLKLSCAASGFTFNKYAINWVRQAPGKGLEWVARIRSKYNNYATYYADAVKDRFTISRDDSKNTVYLQMNNLKTEDTAVYYCARAGNFGSSYISYWAYWGQGTLVTVSS

SEQ ID NO: 60 - protein, 109 aa, Artificial Sequence
  Synthetic
QTVVTQEPSLTVSPGGTVTITCGSSTGAVTSGNYPNWVQKKPGQAPRGLIGGTKFLAPGTPARFSGSLSGGKAALTLSGVQPEDEAEYYCVLWYSNRWVFGSGTKLTVL

SEQ ID NO: 61 - protein, 5 aa, Artificial Sequence
  Synthetic
KYAMN

SEQ ID NO: 62 - protein, 19 aa, Artificial Sequence
  Synthetic
RIRSKYNNYATYYADAVKD

SEQ ID NO: 63 - protein, 14 aa, Artificial Sequence
  Synthetic
AGNFGSSYISYFAY

SEQ ID NO: 64 - protein, 14 aa, Artificial Sequence
  Synthetic
GSSTGAVTSGNYPN

SEQ ID NO: 65 - protein, 7 aa, Artificial Sequence
  Synthetic
GTKFLAP

SEQ ID NO: 66 - protein, 9 aa, Artificial Sequence
  Synthetic
VLYYSNRWV

SEQ ID NO: 67 - protein, 125 aa, Artificial Sequence
  Synthetic
EVQLVESGGGLVQPGGSLKLSCAASGFTFNKYAMNWVRQAPGKGMEWVARIRSKYNNYATYYADAVKDRFTISRDDSKNTLYLQMNNLKTEDTAVYYCVRAGNFGSSYISYFAYWGQGTLVTVSS

SEQ ID NO: 68 - protein, 109 aa, Artificial Sequence
  Synthetic
QTVVTQEPSLTVSPGGTVTITCGSSTGAVTSGNYPNWIQKKPGQAPRGLIGGTKFLAPGTPARFSGSLEGGKAALTLSGVQPEDEAEYYCVLYYSNRWVFGSGTKLTVL

SEQ ID NO: 69 - protein, 5 aa, Artificial Sequence
  Synthetic
KYAIN

SEQ ID NO: 70 - protein, 19 aa, Artificial Sequence
  Synthetic
RIRSKYNNYATYYADAVKD

SEQ ID NO: 71 - protein, 14 aa, Artificial Sequence
  Synthetic
NANFGTSYISYFAY

SEQ ID NO: 72 - protein, 14 aa, Artificial Sequence
  Synthetic
GSSTGAVTSGNYPN

SEQ ID NO: 73 - protein, 7 aa, Artificial Sequence
  Synthetic
GTKFLAP

SEQ ID NO: 74 - protein, 9 aa, Artificial Sequence
  Synthetic
VLWYSNRWV

SEQ ID NO: 75 - protein, 125 aa, Artificial Sequence
  Synthetic
EVQLVESGGGLVQPGGSLKLSCAASGFTFNKYAINWVREAPGKGLEWVARIRSKYNNYATYYADAVKDRFTISRDDSKNTAYLQMNNLKTEDTAVYYCVRNANFGTSYISYFAYWGQGTLVTVSS

SEQ ID NO: 76 - protein, 109 aa, Artificial Sequence
  Synthetic
QTVVTQEPSLTVSPGGTVTLTCGSSTGAVTSGNYPNWVQKKPGQAPRGLIGGTKFLAPGTPARFSGSLLGGKAALTLSGVQPEDEAEYYCVLWYSNRWVFGSGTKLTVL

SEQ ID NO: 77 - protein, 5 aa, Artificial Sequence
  Synthetic
DYYMT

SEQ ID NO: 78 - protein, 17 aa, Artificial Sequence
  Synthetic
YISSSGSTIYYAEAVKG

SEQ ID NO: 79 - protein, 8 aa, Artificial Sequence
  Synthetic
DRNSHFDY

SEQ ID NO: 80 - protein, 11 aa, Artificial Sequence
  Synthetic
RASQGIRTWLA

SEQ ID NO: 81 - protein, 7 aa, Artificial Sequence
  Synthetic
GASGLQS

SEQ ID NO: 82 - protein, 9 aa, Artificial Sequence
  Synthetic
QQAESFPRT

SEQ ID NO: 83 - protein, 117 aa, Artificial Sequence
  Synthetic
QVQLVESGGGLVKPGGSLRLSCAASGFTFSDYYMTWIRQAPGKCLEWLSYISSSGSTIYYAEAVKGRFTISRDNAKNSLFLQMNSLRAEDTAVYYCARDRNSHFDYWGQGTLVTVSS

SEQ ID NO: 84 - protein, 106 aa, Artificial Sequence
  Synthetic
DIMTQSPSSVSASVGDRVTITCRASQGIRTWLAWYQQKPGKAPKLLIYGASGLQSGVPSRFSGSGSGTDFTLTISSLQPEDFATYYCQQAESFPRTFGCGTKVEIK

SEQ ID NO: 85 - protein, 106 aa, Artificial Sequence
  Synthetic
EIMTQSPSSVSASVGDRVTITCRASQGIRTWLAWYQQKPGKAPKLLIYGASGLQSGVPSRFSGSGSGTDFTLTISSLQPEDFATYYCQQAESFPRTFGCGTKVEIK

SEQ ID NO: 86 - protein, 7 aa, Artificial Sequence
  Synthetic
SSSYFWG

SEQ ID NO: 87 - protein, 16 aa, Artificial Sequence
  Synthetic
NIYYSGSSNYNPSLKS

SEQ ID NO: 88 - protein, 11 aa, Artificial Sequence
  Synthetic
LPRGDRDAFDI

SEQ ID NO: 89 - protein, 11 aa, Artificial Sequence
  Synthetic
RASQGISNYLA

SEQ ID NO: 90 - protein, 7 aa, Artificial Sequence
  Synthetic
AASTLQS

SEQ ID NO: 91 - protein, 9 aa, Artificial Sequence
  Synthetic
QQSYSTPFT

SEQ ID NO: 92 - protein, 121 aa, Artificial Sequence
  Synthetic
QVQLQESGPGLVKPSETLSLTCTVSGGSISSSSYFWGWIRQPPGKCLEWIGNIYYSGSSNYNPSLKSRVTISVDTSKNQFSLKLSSVTAADTAVYYCARLPRGDRDAFDIWGQGTMVTVSS

SEQ ID NO: 93 - protein, 107 aa, Artificial Sequence
  Synthetic
DIVMTQSPSSLSASVGDRVTITCRASQGISNYLAWYQQKPGKVPKLLIYAASTLQSGVPSRFSGSGSGTDFTLTISSLQPEDFATYYCQQSYSTPFTFGCGTKVEIK

SEQ ID NO: 94 - protein, 107 aa, Artificial Sequence
  Synthetic
EIVMTQSPSSLSASVGDRVTITCRASQGISNYLAWYQQKPGKVPKLLIYAASTLQSGVPSRFSGSGSGTDFTLTISSLQPEDFATYYCQQSYSTPFTFGCGTKVEIK

SEQ ID NO: 95 - protein, 7 aa, Artificial Sequence
  Synthetic
SSSYFWV

SEQ ID NO: 96 - protein, 16 aa, Artificial Sequence
  Synthetic
SIYYSGSTYYNPSLKS

SEQ ID NO: 97 - protein, 11 aa, Artificial Sequence
  Synthetic
LPRGDRMTFDI

SEQ ID NO: 98 - protein, 12 aa, Artificial Sequence
  Synthetic
RASQSVSSSYLA

SEQ ID NO: 99 - protein, 7 aa, Artificial Sequence
  Synthetic
GASSRAT

SEQ ID NO: 100 - protein, 9 aa, Artificial Sequence
  Synthetic
QQYGSSPFT

SEQ ID NO: 101 - protein, 121 aa, Artificial Sequence
  Synthetic
QVQLQESGPGLVKPSETLSLTCTVSGGSISSSSYFWVWIRQPPGKCLEWIGSIYYSGSTYYNPSLKSRVTISVDTSKNQFSLKLNSVTAADTAVYYCARLPRGDRMTFDIWGQGTMVTVSS

SEQ ID NO: 102 - protein, 108 aa, Artificial Sequence
  Synthetic
EIVLTQSPGTLSLSPGERATLSCRASQSVSSSYLAWYQQKPGQAPRLLIYGASSRATGIPDRFSGSGSGTDFTLTISRLEPEDFAVYYCQQYGSSPFTFGCGTKLEIK

SEQ ID NO: 103 - protein, 5 aa, Artificial Sequence
  Synthetic
SYAMS

SEQ ID NO: 104 - protein, 17 aa, Artificial Sequence
  Synthetic
AISGSGEQWYYAPSVKG

SEQ ID NO: 105 - protein, 12 aa, Artificial Sequence
  Synthetic
VRNYYGSGSLDY

SEQ ID NO: 106 - protein, 12 aa, Artificial Sequence
  Synthetic
RASQSFSSAYLA

SEQ ID NO: 107 - protein, 7 aa, Artificial Sequence
  Synthetic
GASIRAT

SEQ ID NO: 108 - protein, 8 aa, Artificial Sequence
  Synthetic
QQYGSSLT

SEQ ID NO: 109 - protein, 121 aa, Artificial Sequence
  Synthetic
EVQLLESGGGVVQPGRSLRLSCAASGFTFSSYAMSWVRQAPGKCLEWVSAISGSGEQWYYAPSVKGRFTISRDNSKNTLYLQMNSLRAEDTAVYYCAKVRNYYGSGSLDYWGQGTLVTVSS

SEQ ID NO: 110 - protein, 107 aa, Artificial Sequence
  Synthetic
EIVLTQSPGTLSLSPGERATLSCRASQSFSSAYLAWYQQKPGQAPRLLIYGASIRATGIPDRFSGSGSGTDFTLTISRLEPEDFAVYYCQQYGSSLTFGCGTKVEIK

SEQ ID NO: 111 - protein, 5 aa, Artificial Sequence
  Synthetic
SYAMS

SEQ ID NO: 112 - protein, 17 aa, Artificial Sequence
  Synthetic
AISGSGEGDYYANSVKG

SEQ ID NO: 113 - protein, 12 aa, Artificial Sequence
  Synthetic
VRNYYGSGSLDY

SEQ ID NO: 114 - protein, 12 aa, Artificial Sequence
  Synthetic
RASQSVSSTYLA

SEQ ID NO: 115 - protein, 7 aa, Artificial Sequence
  Synthetic
GASIRAT

SEQ ID NO: 116 - protein, 8 aa, Artificial Sequence
  Synthetic
QQYGSSLT

SEQ ID NO: 117 - protein, 121 aa, Artificial Sequence
  Synthetic
EVQLLESGGGVVQPGRSLRLSCAASGFTFSSYAMSWVRQAPGMCLEWVSAISGSGEGDYYANSVKGRFTISRDNSKNTLYLQMNSLRAEDTAVYYCAKVRNYYGSGSLDYWGQGTLVTVSS

SEQ ID NO: 118 - protein, 107 aa, Artificial Sequence
  Synthetic
EIVLTQSPGTLSLSPGERATLSCRASQSVSSTYLAWYQQKPGQAPRLLIYGASIRATGIPDRFSGSGSGTDFTLTISRLEPEDFAVYYCQQYGSSLTFGCGTKVEIK

SEQ ID NO: 119 - protein, 5 aa, Artificial Sequence
  Synthetic
SYAMS

SEQ ID NO: 120 - protein, 17 aa, Artificial Sequence
  Synthetic
AISGSGGSTYYAIDVKG

SEQ ID NO: 121 - protein, 19 aa, Artificial Sequence
  Synthetic
EGYYPGSGYPLYYYFGMDV

SEQ ID NO: 122 - protein, 12 aa, Artificial Sequence
  Synthetic
RASQSVSSSYLA

SEQ ID NO: 123 - protein, 7 aa, Artificial Sequence
  Synthetic
GASSRAT

SEQ ID NO: 124 - protein, 10 aa, Artificial Sequence
  Synthetic
QQYGSSPIFT

SEQ ID NO: 125 - protein, 128 aa, Artificial Sequence
  Synthetic
EVQLLESGGGLVQPGGSLRLSCAASGFTFSSYAMSWVRQAPGKCLEWVSAISGSGGSTYYAIDVKGRFTISRDNSKNTLYLQMNSLRAEDTAVYYCAKEGYYPGSGYPLYYYFGMDVWGQGTTVTVSS

SEQ ID NO: 126 - protein, 109 aa, Artificial Sequence
  Synthetic
EIVLTQSPGTLSLSPGERATLSCRASQSVSSSYLAWYQQKPGQAPRLLIYGASSRATGIPDRFSGSGSGTDFTLTISRLEPEDFAVYYCQQYGSSPIFTFGCGTKVEIK

SEQ ID NO: 127 - protein, 5 aa, Artificial Sequence
  Synthetic
SYGMG

SEQ ID NO: 128 - protein, 17 aa, Artificial Sequence
  Synthetic
VISYHGSNKYYADAVKG

SEQ ID NO: 129 - protein, 21 aa, Artificial Sequence
  Synthetic
EGAHFGSGSYYPLYYYYAMDV

SEQ ID NO: 130 - protein, 12 aa, Artificial Sequence
  Synthetic
RASQSVSSSYLA

SEQ ID NO: 131 - protein, 7 aa, Artificial Sequence
  Synthetic
GASIRAT

SEQ ID NO: 132 - protein, 10 aa, Artificial Sequence
  Synthetic
QQTGSSPIFT

SEQ ID NO: 133 - protein, 130 aa, Artificial Sequence
  Synthetic
QVQLVESGGGVVQPGRSLRLSCAASGFTFSSYGMGWVRQAPGKCLEWVAVISYHGSNKYYADAVKGRFTISRDNSKNTLYLQMNSLRAEDTAVYYCAREGAHFGSGSYYPLYYYYAMDVWGQGTTVTVSS

SEQ ID NO: 134 - protein, 108 aa, Artificial Sequence
  Synthetic
EIVTQSPGTLSLSPGERATLSCRASQSVSSSYLAWYQQKPGQAPRLLIYGASIRATGIPDRFSGSGSGTDFTLTISRLEPEDFAVYYCQQTGSSPIFTFGCGTKVEIK

SEQ ID NO: 135 - protein, 5 aa, Artificial Sequence
  Synthetic
SYAMS

SEQ ID NO: 136 - protein, 17 aa, Artificial Sequence
  Synthetic
AISGSGEFSYYAAAVKG

SEQ ID NO: 137 - protein, 12 aa, Artificial Sequence
  Synthetic
VRNYYGSGSLDY

SEQ ID NO: 138 - protein, 12 aa, Artificial Sequence
  Synthetic
RASQSVSSTYLA

SEQ ID NO: 139 - protein, 7 aa, Artificial Sequence
  Synthetic
GASIRAT

SEQ ID NO: 140 - protein, 8 aa, Artificial Sequence
  Synthetic
QQYQSSLT

SEQ ID NO: 141 - protein, 121 aa, Artificial Sequence
  Synthetic
EVQLLESGGGVVQPGRSLRLSCAASGFTFSSYAMSWVRQAPGKCLEWVSAISGSGEFSYYAAAVKGRFTISRDNSKNTLYLQMNSLRAEDTAVYYCAKVRNYYGSGSLDYWGQGTLVTVSS

SEQ ID NO: 142 - protein, 107 aa, Artificial Sequence
  Synthetic
EIVLTQSPGTLSLSPGERATLSCRASQSVSSTYLAWYQQKPGQAPRLLIYGASIRATGIPDRFSGSGSGTDFTLTISRLEPEDFAVYYCQQYQSSLTFGCGTKVEIK

SEQ ID NO: 143 - protein, 5 aa, Artificial Sequence
  Synthetic
GYYIH

SEQ ID NO: 144 - protein, 17 aa, Artificial Sequence
  Synthetic
WINPNSGGTNYAQKFQG

SEQ ID NO: 145 - protein, 17 aa, Artificial Sequence
  Synthetic
VEAVAGREYYYFSGMDV

SEQ ID NO: 146 - protein, 11 aa, Artificial Sequence
  Synthetic
SGEKLGDKYVY

SEQ ID NO: 147 - protein, 7 aa, Artificial Sequence
  Synthetic
QSTKRPS

SEQ ID NO: 148 - protein, 9 aa, Artificial Sequence
  Synthetic
QAYHASTAV

SEQ ID NO: 149 - protein, 126 aa, Artificial Sequence
  Synthetic
QVQLVQSGAEVKKPGASVKVSCKASGYTFTGYYIHWVRQAPGQCLEWMGWINPNSGGTNYAQKFQGRVTMTRDTSISTAYMELSRLRSDDTAVYYCARVEAVAGREYYYFSGMDVWGQGTTVTVSS

SEQ ID NO: 150 - protein, 106 aa, Artificial Sequence
  Synthetic
SYELTQPPSVSVSPGQTASITCSGEKLGDKYVYWYQQKPGQSPVLVIYQSTKRPSGVPERFSGSNSGNTATLTISGTQAMDEADYYCQAYHASTAVFGCGTKLTVL

SEQ ID NO: 151 - protein, 5 aa, Artificial Sequence
  Synthetic
SYGMG

SEQ ID NO: 152 - protein, 17 aa, Artificial Sequence
  Synthetic
VISYDGSNKYYADSVKG

SEQ ID NO: 153 - protein, 21 aa, Artificial Sequence
  Synthetic
EGAHFGSGSYYPLYYYYAMDV

SEQ ID NO: 154 - protein, 12 aa, Artificial Sequence
  Synthetic
RASQSVSSSYLA

SEQ ID NO: 155 - protein, 7 aa, Artificial Sequence
  Synthetic
GASIRAT

SEQ ID NO: 156 - protein, 10 aa, Artificial Sequence
  Synthetic
QQYGSSPIFT

SEQ ID NO: 157 - protein, 130 aa, Artificial Sequence
  Synthetic
EVQLLESGGGVVQPGRSLRLSCAASGFTFSSYGMGWVRQAPGKGLEWVAVISYDGSNKYYADSVKGRFTISRDNSKNTLYLQMNSLRAEDTAVYYCAREGAHFGSGSYYPLYYYYAMDVWGQGTTVTVSS

SEQ ID NO: 158 - protein, 109 aa, Artificial Sequence
  Synthetic
ELTLTQSPGTLSLSPGERATLSCRASQSVSSSYLAWYQQKPGQAPRLLIYGASIRATGIPDRFSGSGSGTDFTLTISRLEPEDFAVYYCQQYGSSPIFTFGPGTKVEIK

SEQ ID NO: 159 - protein, 5 aa, Artificial Sequence
  Synthetic
SYPIN

SEQ ID NO: 160 - protein, 16 aa, Artificial Sequence
  Synthetic
VIWTGGGTNYASSVKG

SEQ ID NO: 161 - protein, 15 aa, Artificial Sequence
  Synthetic
SRGVYDFKGRGAMDY

SEQ ID NO: 162 - protein, 17 aa, Artificial Sequence
  Synthetic
KSSQSLLYSSNQKNYFA

SEQ ID NO: 163 - protein, 7 aa, Artificial Sequence
  Synthetic
WASTRES

SEQ ID NO: 164 - protein, 9 aa, Artificial Sequence
  Synthetic
QQYYSYPYT

SEQ ID NO: 165 - protein, 123 aa, Artificial Sequence
  Synthetic
EVQLLESGGGLVQPGGSLRLSCAASGFSFSSYPINWVRQAPGKCLEWVGVIWTGGGTNYASSVKGRFTISRDNSKNTVYLQMNSLRAEDTAVYYCAKSRGVYDFKGRGAMDYWGQGTLVTVSS

SEQ ID NO: 166 - protein, 113 aa, Artificial Sequence
  Synthetic
DIVMTQSPDSLAVSLGERATINCKSSQSLLYSSNQKNYFAWYQQKPGQPPKLLIYWASTRESGVPDRFSGSGSGTDFTLTISSLQAEDVAVYYCQQYYSYPYTFGCGTKLEIK

SEQ ID NO: 167 - protein, 113 aa, Artificial Sequence
  Synthetic
EIVMTQSPDSLAVSLGERATINCKSSQSLLYSSNQKNYFAWYQQKPGQPPKLLIYWASTRESGVPDRFSGSGSGTDFTLTISSLQAEDVAVYYCQQYYSYPYTFGCGTKLEIK

SEQ ID NO: 168 - protein, 5 aa, Artificial Sequence
  Synthetic
SYWMH

SEQ ID NO: 169 - protein, 17 aa, Artificial Sequence
  Synthetic
VISGSKSYTIYNQKVKG

SEQ ID NO: 170 - protein, 8 aa, Artificial Sequence
  Synthetic
SGPGYFDV

SEQ ID NO: 171 - protein, 11 aa, Artificial Sequence
  Synthetic
RASENIYSYLA

SEQ ID NO: 172 - protein, 7 aa, Artificial Sequence
  Synthetic
NAKTLAE

SEQ ID NO: 173 - protein, 9 aa, Artificial Sequence
  Synthetic
QHLNMTPYT

SEQ ID NO: 174 - protein, 117 aa, Artificial Sequence
  Synthetic
EVQLLESGGGLVQPGGSLRLSCAASGYTFSSYWMHWVRQAPGKCLEWMGVISGSKSYTIYNQKVKGRFTISRDNSKNTVYLQMNSLRAGDTAVYYCARSGPGYFDVWGQGTMVTVSS

SEQ ID NO: 175 - protein, 107 aa, Artificial Sequence
  Synthetic
DIQLTQSPSFLSASVGDRVTITCRASENIYSYLAWYQQKPGKAPKLLIYNAKTLAEGVPSRFSGSGSGTEFTLTISSLQPEDFGTYYCQHLNMTPYTFGCGTKLEIK

SEQ ID NO: 176 - protein, 107 aa, Artificial Sequence
  Synthetic
EIQLTQSPSFLSASVGDRVTITCRASENIYSYLAWYQQKPGKAPKLLIYNAKTLAEGVPSRFSGSGSGTEFTLTISSLQPEDFGTYYCQHLNMTPYTFGCGTKLEIK

SEQ ID NO: 177 - protein, 5 aa, Artificial Sequence
  Synthetic
SYWMH

SEQ ID NO: 178 - protein, 17 aa, Artificial Sequence
  Synthetic
KIDPSDDYTNYNQKVKG

SEQ ID NO: 179 - protein, 8 aa, Artificial Sequence
  Synthetic
WDYNYFDV

SEQ ID NO: 180 - protein, 10 aa, Artificial Sequence
  Synthetic
RASSSVSYMH

SEQ ID NO: 181 - protein, 7 aa, Artificial Sequence
  Synthetic
GTSNLVS

SEQ ID NO: 182 - protein, 9 aa, Artificial Sequence
  Synthetic
QQWSSYPLT

SEQ ID NO: 183 - protein, 117 aa, Artificial Sequence
  Synthetic
EVQLLESGGGLVQPGGSLRLSCAASGFTFSSYWMHWVRQTPGKCLEWVSKIDPSDDYTNYNQKVKGRFTISIDKSKNTLYLQMNSLRAEDTAVYYCARWDYNYFDVWGQGTTVTVSS

SEQ ID NO: 184 - protein, 106 aa, Artificial Sequence
  Synthetic
EIVMTQSPATLSVSPGERATLTCRASSSVSYMHWYQQKPGQAPRLLIYGTSNLVSGVPARFSGSGSGTEFTLTISSLQSEDFAVYYCQQWSSYPLTFGCGTKVEIK

SEQ ID NO: 185 - protein, 5 aa, Artificial Sequence
  Synthetic
SYWMH

SEQ ID NO: 186 - protein, 17 aa, Artificial Sequence
  Synthetic
VIYTSGSYTIYNQKFQG

SEQ ID NO: 187 - protein, 8 aa, Artificial Sequence
  Synthetic
SGPGYFDV

SEQ ID NO: 188 - protein, 11 aa, Artificial Sequence
  Synthetic
RASGNIHNYLA

SEQ ID NO: 189 - protein, 7 aa, Artificial Sequence
  Synthetic
NAKTLAE

SEQ ID NO: 190 - protein, 9 aa, Artificial Sequence
  Synthetic
QHFAWTPYT

SEQ ID NO: 191 - protein, 117 aa, Artificial Sequence
  Synthetic
QVQLVQSGAEVKKPGASVKVSCKASGYTFTSYWMHWVRQAPGQCLEWMGVIYTSGSYTIYNQKFQGRVTMTRDTSTSTAYMELSSLRSEDTAVYYCARSGPGYFDVWGQGTMVTVSS

SEQ ID NO: 192 - protein, 107 aa, Artificial Sequence
  Synthetic
DIQLTQSPSFLSASVGDRVTITCRASGNIHNYLAWYQQKPGKAPKLLIYNAKTLAEGVPSRFSGSGSGTEFTLKISSLQPEDFATYYCQHFAWTPYTFGCGTKLEIK

SEQ ID NO: 193 - protein, 107 aa, Artificial Sequence
  Synthetic
EIQLTQSPSFLSASVGDRVTITCRASGNIHNYLAWYQQKPGKAPKLLIYNAKTLAEGVPSRFSGSGSGTEFTLKISSLQPEDFATYYCQHFAWTPYTFGCGTKLEIK

SEQ ID NO: 194 - protein, 5 aa, Artificial Sequence
  Synthetic
NYWMN

SEQ ID NO: 195 - protein, 17 aa, Artificial Sequence
  Synthetic
NIAYGVKGTNYNQKFQG

SEQ ID NO: 196 - protein, 8 aa, Artificial Sequence
  Synthetic
RYFYVMDY

SEQ ID NO: 197 - protein, 11 aa, Artificial Sequence
  Synthetic
RASQDISNYLN

SEQ ID NO: 198 - protein, 7 aa, Artificial Sequence
  Synthetic
YTSRLHS

SEQ ID NO: 199 - protein, 9 aa, Artificial Sequence
  Synthetic
VQYAQFPLT

SEQ ID NO: 200 - protein, 117 aa, Artificial Sequence
  Synthetic
QVQLVQSGAEVKKPGASVKVSCKASGYTFTNYWMNWVRQAPGQCLEWMGNIAYGVKGTNYNQKFQGRVTMTVDTSSSTAYMELSRLRSDDTAVYYCATRYFYVMDYWGQGTLVTVSS

SEQ ID NO: 201 - protein, 107 aa, Artificial Sequence
  Synthetic
DIQMTQSPSSLSASVGDRVTITCRASQDISNYLNWYQQKPGKVPKLLIYYTSRLHSGVPSRFSGSGSGTDFTLTISSLQPEDVATYYCVQYAQFPLTFGCGTKVEIK

SEQ ID NO: 202 - protein, 107 aa, Artificial Sequence
  Synthetic
EIQMTQSPSSLSASVGDRVTITCRASQDISNYLNWYQQKPGKVPKLLIYYTSRLHSGVPSRFSGSGSGTDFTLTISSLQPEDVATYYCVQYAQFPLTFGCGTKVEIK

SEQ ID NO: 203 - protein, 5 aa, Artificial Sequence
  Synthetic
SSWMN

SEQ ID NO: 204 - protein, 17 aa, Artificial Sequence
  Synthetic
RIYTGTGETKYSGKFQG

SEQ ID NO: 205 - protein, 12 aa, Artificial Sequence
  Synthetic
QRDYGALYAMDY

SEQ ID NO: 206 - protein, 11 aa, Artificial Sequence
  Synthetic
RASDDIYSYLA

SEQ ID NO: 207 - protein, 7 aa, Artificial Sequence
  Synthetic
NAKTLAE

SEQ ID NO: 208 - protein, 9 aa, Artificial Sequence
  Synthetic
QNHDRTPFT

SEQ ID NO: 209 - protein, 121 aa, Artificial Sequence
  Synthetic
QVQLVQSGAEVVKPGASVKVSCKASGYTFTSSWMNWVRQAPGQCLEWMGRIYTGTGETKYSGKFQGRVTITRDTSASTAYMELSSLTSEDTAVYYCARQRDYGALYAMDYWGQGTLVTVSS

SEQ ID NO: 210 - protein, 107 aa, Artificial Sequence
  Synthetic
DIQLTQSPSFLSASVGDRVTITCRASDDIYSYLAWYQQKPGKAPKLLVYNAKTLAEGVPSRFSGSGSGTEFTLTISSLQPEDFATYYCQNHDRTPFTFGCGTKVDIK

SEQ ID NO: 211 - protein, 107 aa, Artificial Sequence
  Synthetic
EIQLTQSPSFLSASVGDRVTITCRASDDIYSYLAWYQQKPGKAPKLLVYNAKTLAEGVPSRFSGSGSGTEFTLTISSLQPEDFATYYCQNHDRTPFTFGCGTKVDIK

SEQ ID NO: 212 - protein, 5 aa, Artificial Sequence
  Synthetic
NYWMN

SEQ ID NO: 213 - protein, 17 aa, Artificial Sequence
  Synthetic
NIHSKAHGTNYNQKFQG

SEQ ID NO: 214 - protein, 8 aa, Artificial Sequence
  Synthetic
RYFYVMDY

SEQ ID NO: 215 - protein, 11 aa, Artificial Sequence
  Synthetic
RASQDISNYLN

SEQ ID NO: 216 - protein, 7 aa, Artificial Sequence
  Synthetic
YTSRLHS

SEQ ID NO: 217 - protein, 9 aa, Artificial Sequence
  Synthetic
VQYAQFPLT

SEQ ID NO: 218 - protein, 117 aa, Artificial Sequence
  Synthetic
QVQLVQSGAEVKKPGASVKVSCKASGYTFTNYWMNWVRQAPGQCLEWMGNIHSKAHGTNYNQKFQGRVTMTVDTSSSTAYMELSRLRSDDTAVYYCATRYFYVMDYWGQGTLVTVSS

SEQ ID NO: 219 - protein, 107 aa, Artificial Sequence; identical to SEQ ID NO: 201
  Synthetic

SEQ ID NO: 220 - protein, 107 aa, Artificial Sequence; identical to SEQ ID NO: 202
  Synthetic

SEQ ID NO: 221 - protein, 5 aa, Artificial Sequence
  Synthetic
SYWMH

SEQ ID NO: 222 - protein, 17 aa, Artificial Sequence
  Synthetic
VIRTSTSYTIYNQKFKG

SEQ ID NO: 223 - protein, 8 aa, Artificial Sequence
  Synthetic
SGPGYFDV

SEQ ID NO: 224 - protein, 11 aa, Artificial Sequence
  Synthetic
RASENIYSYLA

SEQ ID NO: 225 - protein, 7 aa, Artificial Sequence
  Synthetic
NAKTLAE

SEQ ID NO: 226 - protein, 9 aa, Artificial Sequence
  Synthetic
QHNYGTPYT

SEQ ID NO: 227 - protein, 117 aa, Artificial Sequence
  Synthetic
QVQLVQSGAEVKKPGASVKVSCKASGYTFTSYWMHWVRQAPGQCLEWMGVIRTSTSYTIYNQKFKGRVTMTRDTSTSTVYMELSSLRSEDTAVYYCARSGPGYFDVWGQGTMVTVSS

SEQ ID NO: 228 - protein, 107 aa, Artificial Sequence
  Synthetic
DIQLTQSPSFLSASVGDRVTITCRASENIYSYLAWYQQKPGKAPKLLIYNAKTLAEGVPSRFSGSGSGTEFTLTISSLQPEDFATYYCQHNYGTPYTFGCGTKLEIK

SEQ ID NO: 229 - protein, 107 aa, Artificial Sequence
  Synthetic
EIQLTQSPSFLSASVGDRVTITCRASENIYSYLAWYQQKPGKAPKLLIYNAKTLAEGVPSRFSGSGSGTEFTLTISSLQPEDFATYYCQHNYGTPYTFGCGTKLEIK

SEQ ID NO: 230 - protein, 5 aa, Artificial Sequence
  Synthetic
SYWMY

SEQ ID NO: 231 - protein, 17 aa, Artificial Sequence
  Synthetic
KIDPSDDYTNYNQKVKG

SEQ ID NO: 232 - protein, 8 aa, Artificial Sequence
  Synthetic
WDYTHFDV

SEQ ID NO: 233 - protein, 10 aa, Artificial Sequence
  Synthetic
RASSSVSYMH

SEQ ID NO: 234 - protein, 7 aa, Artificial Sequence
  Synthetic
GTSNLAS

SEQ ID NO: 235 - protein, 9 aa, Artificial Sequence
  Synthetic
QQWSSYPLT

SEQ ID NO: 236 - protein, 117 aa, Artificial Sequence
  Synthetic
EVQLLESGGGLVQPGGSVRLSCAASGFTFSSYWMYWVRQAPGKCLEWVSKIDPSDDYTNYNQKVKGRFTISIDNSKNTLYLQMNSLRAEDSAVYYCARWDYTHFDVWGQGTTVTVSS

SEQ ID NO: 237 - protein, 106 aa, Artificial Sequence
  Synthetic
EIVMTQSPATLSVSPGERATLSCRASSSVSYMHWYQQKPGQAPRLLIYGTSNLASGVPVRFSGSGSGTEFTLTISRLQSEDVAVYYCQQWSSYPLTFGCGTKVEIK

SEQ ID NO: 238 - protein, 5 aa, Artificial Sequence
  Synthetic
SYWMH

SEQ ID NO: 239 - protein, 17 aa, Artificial Sequence
  Synthetic
KIDPSDDYTNYNQKVKG

SEQ ID NO: 240 - protein, 8 aa, Artificial Sequence
  Synthetic
WDYSHFDV

SEQ ID NO: 241 - protein, 10 aa, Artificial Sequence
  Synthetic
RASSSVSYMH

SEQ ID NO: 242 - protein, 7 aa, Artificial Sequence
  Synthetic
GTSNLVS

SEQ ID NO: 243 - protein, 9 aa, Artificial Sequence
  Synthetic
QQWSSYPLT

SEQ ID NO: 244 - protein, 117 aa, Artificial Sequence
  Synthetic
EVQLLESGGGLVQPGGSLRLSCAASGFTFSSYWMHWVRQTPGKCLEWVSKIDPSDDYTNYNQKVKGRFTISIDKSKNTLYLQMNSLRAEDTAVYYCARWDYSHFDVWGQGTTVTVSS

SEQ ID NO: 245 - protein, 106 aa, Artificial Sequence; identical to SEQ ID NO: 184
  Synthetic

SEQ ID NO: 246 - protein, 1491 aa, Artificial Sequence
  Synthetic
EVQLLESGGGLVQPGGSLRLSCAASGFSFSSYPINWVRQAPGKCLEWVGVIWTGGGTNYASSVKGRFTISRDNSKNTVYLQMNSLRAEDTAVYYCAKSRGVYDFKGRGAMDYWGQGTLVTVSSGGGGSGGGGSGGGGSDIVMTQSPDSLAVSLGERATINCKSSQSLLYSSNQKNYFAWYQQKPGQPPKLLIYWASTRESGVPDRFSGSGSGTDFTLTISSLQAEDVAVYYCQQYYSYPYTFGCGTKLEIKSGGGGSEVQLVESGGGLVQPGGSLKLSCAASGFTFNKYAMNWVRQAPGKCLEWVARIRSKYNNYATYYADSVKDRFTISRDDSKNTAYLQMNNLKTEDTAVYYCVRHGNFGNSYISYWAYWGQGTLVTVSSGGGGSGGGGSGGGGSQTVVTQEPSLTVSPGGTVTLTCGSSTGAVTSGNYPNWVQQKPGQAPRGLIGGTKFLAPGTPARFSGSLLGGKAALTLSGVQPEDEAEYYCVLWYSNRWVFGCGTKLTVLGGGGDKTHTCPPCPAPELLGGPSVFLFPPKPKDTLMISRTPEVTCVVVDVSHEDPEVKFNWYVDGVEVHNAKTKPCEEQYGSTYRCVSVLTVLHQDWLNGKEYKCKVSNKALPAPIEKTISKAKGQPREPQVYTLPPSREEMTKNQVSLTCLVKGFYPSDIAVEWESNGQPENNYKTTPPVLDSDGSFFLYSKLTVDKSRWQQGNVFSCSVMHEALHNHYTQKSLSLSPGKGGGGSGGGGSGGGGSGGGGSGGGGSGGGGSDKTHTCPPCPAPELLGGPSVFLFPPKPKDTLMISRTPEVTCVVVDVSHEDPEVKFNWYVDGVEVHNAKTKPCEEQYGSTYRCVSVLTVLHQDWLNGKEYKCKVSNKALPAPIEKTISKAKGQPREPQVYTLPPSREEMTKNQVSLTCLVKGFYPSDIAVEWESNGQPENNYKTTPPVLDSDGSFFLYSKLTVDKSRWQQGNVFSCSVMHEALHNHYTQKSLSLSPGKGGGGQVQLVESGGGLVKPGGSLRLSCAASGFTFSDYYMTWIRQAPGKCLEWLSYISSSGSTIYYAEAVKGRFTISRDNAKNSLFLQMNSLRAEDTAVYYCARDRNSHFDYWGQGTLVTVSSGGGGSGGGGSGGGGSDIMTQSPSSVSASVGDRVTITCRASQGIRTWLAWYQQKPGKAPKLLIYGASGLQSGVPSRFSGSGSGTDFTLTISSLQPEDFATYYCQQAESFPRTFGCGTKVEIKSGGGGSEVQLVESGGGLVQPGGSLKLSCAASGFTFNKYAMNWVRQAPGKCLEWVARIRSKYNNYATYYADSVKDRFTISRDDSKNTAYLQMNNLKTEDTAVYYCVRHGNFGNSYISYWAYWGQGTLVTVSSGGGGSGGGGSGGGGSQTVVTQEPSLTVSPGGTVTLTCGSSTGAVTSGNYPNWVQQKPGQAPRGLIGGTKFLAPGTPARFSGSLLGGKAALTLSGVQPEDEAEYYCVLWYSNRWVFGCGTKLTVL

SEQ ID NO: 247 - protein, 1509 aa, Artificial Sequence
  Synthetic
EVQLLESGGGLVQPGGSLRLSCAASGFTFSSYWMHWVRQTPGKCLEWVSKIDPSDDYTNYNQKVKGRFTISIDKSKNTLYLQMNSLRAEDTAVYYCARWDYNYFDVWGQGTTVTVSSGGGGSGGGGSGGGGSEIVMTQSPATLSVSPGERATLTCRASSSVSYMHWYQQKPGQAPRLLIYGTSNLVSGVPARFSGSGSGTEFTLTISSLQSEDFAVYYCQQWSSYPLTFGCGTKVEIKSGGGGSEVQLVESGGGLVQPGGSLKLSCAASGFTFNKYAMNWVRQAPGKCLEWVARIRSKYNNYATYYADSVKDRFTISRDDSKNTAYLQMNNLKTEDTAVYYCVRHGNFGNSYISYWAYWGQGTLVTVSSGGGGSGGGGSGGGGSQTVVTQEPSLTVSPGGTVTLTCGSSTGAVTSGNYPNWVQQKPGQAPRGLIGGTKFLAPGTPARFSGSLLGGKAALTLSGVQPEDEAEYYCVLWYSNRWVFGCGTKLTVLGGGGSGGGGSGGGGSDKTHTCPPCPAPELLGGPSVFLFPPKPKDTLMISRTPEVTCVVVDVSHEDPEVKFNWYVDGVEVHNAKTKPCEEQYGSTYRCVSVLTVLHQDWLNGKEYKCKVSNKALPAPIEKTISKAKGQPREPQVYTLPPSREEMTKNQVSLTCLVKGFYPSDIAVEWESNGQPENNYKTTPPVLDSDGSFFLYSKLTVDKSRWQQGNVFSCSVMHEALHNHYTQKSLSLSPGKGGGGSGGGGSGGGGSGGGGSGGGGSGGGGSDKTHTCPPCPAPELLGGPSVFLFPPKPKDTLMISRTPEVTCVVVDVSHEDPEVKFNWYVDGVEVHNAKTKPCEEQYGSTYRCVSVLTVLHQDWLNGKEYKCKVSNKALPAPIEKTISKAKGQPREPQVYTLPPSREEMTKNQVSLTCLVKGFYPSDIAVEWESNGQPENNYKTTPPVLDSDGSFFLYSKLTVDKSRWQQGNVFSCSVMHEALHNHYTQKSLSLSPGKGGGGSGGGGSGGGGSQVQLVQSGAEVKKPGASVKVSCKASGYTFTGYYIHWVRQAPGQCLEWMGWINPNSGGTNYAQKFQGRVTMTRDTSISTAYMELSRLRSDDTAVYYCARVEAVAGREYYYFSGMDVWGQGTTVTVSSGGGGSGGGGSGGGGSSYELTQPPSVSVSPGQTASITCSGEKLGDKYVYWYQQKPGQSPVLVIYQSTKRPSGVPERFSGSNSGNTATLTISGTQAMDEADYYCQAYHASTAVFGCGTKLTVLSGGGGSEVQLVESGGGLVQPGGSLKLSCAASGFTFNKYAMNWVRQAPGKCLEWVARIRSKYNNYATYYADSVKDRFTISRDDSKNTAYLQMNNLKTEDTAVYYCVRHGNFGNSYISYWAYWGQGTLVTVSSGGGGSGGGGSGGGGSQTVVTQEPSLTVSPGGTVTLTCGSSTGAVTSGNYPNWVQQKPGQAPRGLIGGTKFLAPGTPARFSGSLLGGKAALTLSGVQPEDEAEYYCVLWYSNRWVFGCGTKLTVL

SEQ ID NO: 248 - protein, 1509 aa, Artificial Sequence
  Synthetic
EVQLLESGGGLVQPGGSLRLSCAASGFTFSSYWMHWVRQTPGKCLEWVSKIDPSDDYTNYNQKVKGRFTISIDKSKNTLYLQMNSLRAEDTAVYYCARWDYNYFDVWGQGTTVTVSSGGGGSGGGGSGGGGSEIVMTQSPATLSVSPGERATLTCRASSSVSYMHWYQQKPGQAPRLLIYGTSNLVSGVPARFSGSGSGTEFTLTISSLQSEDFAVYYCQQWSSYPLTFGCGTKVEIKSGGGGSEVQLVESGGGLVQPGGSLKLSCAASGFTFNKYAMNWVRQAPGKGMEWVARIRSKYNNYATYYADAVKDRFTISRDDSKNTLYLQMNNLKTEDTAVYYCVRAGNFGSSYISYFAYWGQGTLVTVSSGGGGSGGGGSGGGGSQTVVTQEPSLTVSPGGTVTITCGSSTGAVTSGNYPNWIQKKPGQAPRGLIGGTKFLAPGTPARFSGSLEGGKAALTLSGVQPEDEAEYYCVLYYSNRWVFGSGTKLTVLGGGGSGGGGSGGGGSDKTHTCPPCPAPELLGGPSVFLFPPKPKDTLMISRTPEVTCVVVDVSHEDPEVKFNWYVDGVEVHNAKTKPCEEQYGSTYRCVSVLTVLHQDWLNGKEYKCKVSNKALPAPIEKTISKAKGQPREPQVYTLPPSREEMTKNQVSLTCLVKGFYPSDIAVEWESNGQPENNYKTTPPVLDSDGSFFLYSKLTVDKSRWQQGNVFSCSVMHEALHNHYTQKSLSLSPGKGGGGSGGGGSGGGGSGGGGSGGGGSGGGGSDKTHTCPPCPAPELLGGPSVFLFPPKPKDTLMISRTPEVTCVVVDVSHEDPEVKFNWYVDGVEVHNAKTKPCEEQYGSTYRCVSVLTVLHQDWLNGKEYKCKVSNKALPAPIEKTISKAKGQPREPQVYTLPPSREEMTKNQVSLTCLVKGFYPSDIAVEWESNGQPENNYKTTPPVLDSDGSFFLYSKLTVDKSRWQQGNVFSCSVMHEALHNHYTQKSLSLSPGKGGGGSGGGGSGGGGSQVQLVQSGAEVKKPGASVKVSCKASGYTFTGYYIHWVRQAPGQCLEWMGWINPNSGGTNYAQKFQGRVTMTRDTSISTAYMELSRLRSDDTAVYYCARVEAVAGREYYYFSGMDVWGQGTTVTVSSGGGGSGGGGSGGGGSSYELTQPPSVSVSPGQTASITCSGEKLGDKYVYWYQQKPGQSPVLVIYQSTKRPSGVPERFSGSNSGNTATLTISGTQAMDEADYYCQAYHASTAVFGCGTKLTVLSGGGGSEVQLVESGGGLVQPGGSLKLSCAASGFTFNKYAMNWVRQAPGKGMEWVARIRSKYNNYATYYADAVKDRFTISRDDSKNTLYLQMNNLKTEDTAVYYCVRAGNFGSSYISYFAYWGQGTLVTVSSGGGGSGGGGSGGGGSQTVVTQEPSLTVSPGGTVTITCGSSTGAVTSGNYPNWIQKKPGQAPRGLIGGTKFLAPGTPARFSGSLEGGKAALTLSGVQPEDEAEYYCVLYYSNRWVFGSGTKLTVL

SEQ ID NO: 249 - protein, 1487 aa, Artificial Sequence
  Synthetic
EVQLLESGGGLVQPGGSLRLSCAASGFTFSSYWMHWVRQTPGKCLEWVSKIDPSDDYTNYNQKVKGRFTISIDKSKNTLYLQMNSLRAEDTAVYYCARWDYNYFDVWGQGTTVTVSSGGGGSGGGGSGGGGSEIVMTQSPATLSVSPGERATLTCRASSSVSYMHWYQQKPGQAPRLLIYGTSNLVSGVPARFSGSGSGTEFTLTISSLQSEDFAVYYCQQWSSYPLTFGCGTKVEIKSGGGGSEVQLVESGGGLVQPGGSLKLSCAASGFTFNKYAMNWVRQAPGKCLEWVARIRSKYNNYATYYADSVKDRFTISRDDSKNTAYLQMNNLKTEDTAVYYCVRHGNFGNSYISYWAYWGQGTLVTVSSGGGGSGGGGSGGGGSQTVVTQEPSLTVSPGGTVTLTCGSSTGAVTSGNYPNWVQQKPGQAPRGLIGGTKFLAPGTPARFSGSLLGGKAALTLSGVQPEDEAEYYCVLWYSNRWVFGCGTKLTVLGGGGDKTHTCPPCPAPELLGGPSVFLFPPKPKDTLMISRTPEVTCVVVDVSHEDPEVKFNWYVDGVEVHNAKTKPCEEQYGSTYRCVSVLTVLHQDWLNGKEYKCKVSNKALPAPIEKTISKAKGQPREPQVYTLPPSREEMTKNQVSLTCLVKGFYPSDIAVEWESNGQPENNYKTTPPVLDSDGSFFLYSKLTVDKSRWQQGNVFSCSVMHEALHNHYTQKSLSLSPGKGGGGSGGGGSGGGGSGGGGSGGGGSGGGGSDKTHTCPPCPAPELLGGPSVFLFPPKPKDTLMISRTPEVTCVVVDVSHEDPEVKFNWYVDGVEVHNAKTKPCEEQYGSTYRCVSVLTVLHQDWLNGKEYKCKVSNKALPAPIEKTISKAKGQPREPQVYTLPPSREEMTKNQVSLTCLVKGFYPSDIAVEWESNGQPENNYKTTPPVLDSDGSFFLYSKLTVDKSRWQQGNVFSCSVMHEALHNHYTQKSLSLSPGKGGGGQVQLVQSGAEVKKPGASVKVSCKASGYTFTGYYIHWVRQAPGQCLEWMGWINPNSGGTNYAQKFQGRVTMTRDTSISTAYMELSRLRSDDTAVYYCARVEAVAGREYYYFSGMDVWGQGTTVTVSSGGGGSGGGGSGGGGSSYELTQPPSVSVSPGQTASITCSGEKLGDKYVYWYQQKPGQSPVLVIYQSTKRPSGVPERFSGSNSGNTATLTISGTQAMDEADYYCQAYHASTAVFGCGTKLTVLSGGGGSEVQLVESGGGLVQPGGSLKLSCAASGFTFNKYAMNWVRQAPGKCLEWVARIRSKYNNYATYYADSVKDRFTISRDDSKNTAYLQMNNLKTEDTAVYYCVRHGNFGNSYISYWAYWGQGTLVTVSSGGGGSGGGGSGGGGSQTVVTQEPSLTVSPGGTVTLTCGSSTGAVTSGNYPNWVQQKPGQAPRGLIGGTKFLAPGTPARFSGSLLGGKAALTLSGVQPEDEAEYYCVLWYSNRWVFGCGTKLTVL

SEQ ID NO: 250 - protein, 1496 aa, Artificial Sequence
  Synthetic
QVQLVQSGAEVKKPGASVKVSCKASGYTFTNYWMNWVRQAPGQCLEWMGNIAYGVKGTNYNQKFQGRVTMTVDTSSSTAYMELSRLRSDDTAVYYCATRYFYVMDYWGQGTLVTVSSGGGGQGGGGQGGGGQDIQMTQSPSSLSASVGDRVTITCRASQDISNYLNWYQQKPGKVPKLLIYYTSRLHSGVPSRFSGSGSGTDFTLTISSLQPEDVATYYCVQYAQFPLTFGCGTKVEIKSGGGGQEVQLVESGGGLVQPGGSLKLSCAASGFTFNKYAMNWVRQAPGKGMEWVARIRSKYNNYATYYADAVKDRFTISRDDSKNTLYLQMNNLKTEDTAVYYCVRAGNFGSSYISYFAYWGQGTLVTVSSGGGGQGGGGQGGGGQQTVVTQEPSLTVSPGGTVTITCGSSTGAVTSGNYPNWIQKKPGQAPRGLIGGTKFLAPGTPARFSGSLEGGKAALTLSGVQPEDEAEYYCVLYYSNRWVFGSGTKLTVLGGGGQGGGGQGGGGQCPPCPAPELLGGPSVFLFPPKPKDTLMISRTPEVTCVVVDVSHEEPEVKFNWYVDGVEVHNAKTKPCEEQYGSTYRCVSVLTVLHQDWLNGKEYKCKVSNKALPAPIEKTISKAKGQPREPQVYTLPPSREEMTKNQVSLTCLVKGFYPSDIAVEWESNGQPENNYKTTPPVLDSDGSFFLYSKLTVDKSRWQQGNVFSCSVMHEALHNHYTQKSLSLSPGKGGGGQGGGGQGGGGQGGGGQGGGGQGGGGQCPPCPAPELLGGPSVFLFPPKPKDTLMISRTPEVTCVVVDVSHEEPEVKFNWYVDGVEVHNAKTKPCEEQYGSTYRCVSVLTVLHQDWLNGKEYKCKVSNKALPAPIEKTISKAKGQPREPQVYTLPPSREEMTKNQVSLTCLVKGFYPSDIAVEWESNGQPENNYKTTPPVLDSDGSFFLYSKLTVDKSRWQQGNVFSCSVMHEALHNHYTQKSLSLSPGKGGGGQGGGGQGGGGQQVQLQESGPGLVKPSETLSLTCTVSGGSISSSSYFWGWIRQPPGKCLEWIGNIYYSGSSNYNPSLKSRVTISVDTSKNQFSLKLSSVTAADTAVYYCARLPRGDRDAFDIWGQGTMVTVSSGGGGQGGGGQGGGGQDIVMTQSPSSLSASVGDRVTITCRASQGISNYLAWYQQKPGKVPKLLIYAASTLQSGVPSRFSGSGSGTDFTLTISSLQPEDFATYYCQQSYSTPFTFGCGTKVEIKSGGGGQEVQLVESGGGLVQPGGSLKLSCAASGFTFNKYAMNWVRQAPGKGMEWVARIRSKYNNYATYYADAVKDRFTISRDDSKNTLYLQMNNLKTEDTAVYYCVRAGNFGSSYISYFAYWGQGTLVTVSSGGGGQGGGGQGGGGQQTVVTQEPSLTVSPGGTVTITCGSSTGAVTSGNYPNWIQKKPGQAPRGLIGGTKFLAPGTPARFSGSLEGGKAALTLSGVQPEDEAEYYCVLYYSNRWVFGSGTKLTVL

SEQ ID NO: 251 - protein, 1474 aa, Artificial Sequence
  Synthetic
QVQLVQSGAEVKKPGASVKVSCKASGYTFTNYWMNWVRQAPGQCLEWMGNIAYGVKGTNYNQKFQGRVTMTVDTSSSTAYMELSRLRSDDTAVYYCATRYFYVMDYWGQGTLVTVSSGGGGQGGGGQGGGGQDIQMTQSPSSLSASVGDRVTITCRASQDISNYLNWYQQKPGKVPKLLIYYTSRLHSGVPSRFSGSGSGTDFTLTISSLQPEDVATYYCVQYAQFPLTFGCGTKVEIKSGGGGQEVQLVESGGGLVQPGGSLKLSCAASGFTFNKYAMNWVRQAPGKGMEWVARIRSKYNNYATYYADAVKDRFTISRDDSKNTLYLQMNNLKTEDTAVYYCVRAGNFGSSYISYFAYWGQGTLVTVSSGGGGQGGGGQGGGGQQTVVTQEPSLTVSPGGTVTITCGSSTGAVTSGNYPNWIQKKPGQAPRGLIGGTKFLAPGTPARFSGSLEGGKAALTLSGVQPEDEAEYYCVLYYSNRWVFGSGTKLTVLGGGGCPPCPAPELLGGPSVFLFPPKPKDTLMISRTPEVTCVVVDVSHEEPEVKFNWYVDGVEVHNAKTKPCEEQYGSTYRCVSVLTVLHQDWLNGKEYKCKVSNKALPAPIEKTISKAKGQPREPQVYTLPPSREEMTKNQVSLTCLVKGFYPSDIAVEWESNGQPENNYKTTPPVLDSDGSFFLYSKLTVDKSRWQQGNVFSCSVMHEALHNHYTQKSLSLSPGKGGGGQGGGGQGGGGQGGGGQGGGGQGGGGQCPPCPAPELLGGPSVFLFPPKPKDTLMISRTPEVTCVVVDVSHEEPEVKFNWYVDGVEVHNAKTKPCEEQYGSTYRCVSVLTVLHQDWLNGKEYKCKVSNKALPAPIEKTISKAKGQPREPQVYTLPPSREEMTKNQVSLTCLVKGFYPSDIAVEWESNGQPENNYKTTPPVLDSDGSFFLYSKLTVDKSRWQQGNVFSCSVMHEALHNHYTQKSLSLSPGKGGGGQVQLQESGPGLVKPSETLSLTCTVSGGSISSSSYFWGWIRQPPGKCLEWIGNIYYSGSSNYNPSLKSRVTISVDTSKNQFSLKLSSVTAADTAVYYCARLPRGDRDAFDIWGQGTMVTVSSGGGGQGGGGQGGGGQDIVMTQSPSSLSASVGDRVTITCRASQGISNYLAWYQQKPGKVPKLLIYAASTLQSGVPSRFSGSGSGTDFTLTISSLQPEDFATYYCQQSYSTPFTFGCGTKVEIKSGGGGQEVQLVESGGGLVQPGGSLKLSCAASGFTFNKYAMNWVRQAPGKGMEWVARIRSKYNNYATYYADAVKDRFTISRDDSKNTLYLQMNNLKTEDTAVYYCVRAGNFGSSYISYFAYWGQGTLVTVSSGGGGQGGGGQGGGGQQTVVTQEPSLTVSPGGTVTITCGSSTGAVTSGNYPNWIQKKPGQAPRGLIGGTKFLAPGTPARFSGSLEGGKAALTLSGVQPEDEAEYYCVLYYSNRWVFGSGTKLTVL

SEQ ID NO: 252 - protein, 1484 aa, Artificial Sequence
  Synthetic
QVQLVQSGAEVKKPGASVKVSCKASGYTFTNYWMNWVRQAPGQCLEWMGNIAYGVKGTNYNQKFQGRVTMTVDTSSSTAYMELSRLRSDDTAVYYCATRYFYVMDYWGQGTLVTVSSGGGGSGGGGSGGGGSDIQMTQSPSSLSASVGDRVTITCRASQDISNYLNWYQQKPGKVPKLLIYYTSRLHSGVPSRFSGSGSGTDFTLTISSLQPEDVATYYCVQYAQFPLTFGCGTKVEIKSGGGGSEVQLVESGGGLVQPGGSLKLSCAASGFTFNKYAMNWVRQAPGKGMEWVARIRSKYNNYATYYADAVKDRFTISRDDSKNTLYLQMNNLKTEDTAVYYCVRAGNFGSSYISYFAYWGQGTLVTVSSGGGGSGGGGSGGGGSQTVVTQEPSLTVSPGGTVTITCGSSTGAVTSGNYPNWIQKKPGQAPRGLIGGTKFLAPGTPARFSGSLEGGKAALTLSGVQPEDEAEYYCVLYYSNRWVFGSGTKLTVLGGGGDKTHTCPPCPAPELLGGPSVFLFPPKPKDTLMISRTPEVTCVVVDVSHEDPEVKFNWYVDGVEVHNAKTKPCEEQYGSTYRCVSVLTVLHQDWLNGKEYKCKVSNKALPAPIEKTISKAKGQPREPQVYTLPPSREEMTKNQVSLTCLVKGFYPSDIAVEWESNGQPENNYKTTPPVLDSDGSFFLYSKLTVDKSRWQQGNVFSCSVMHEALHNHYTQKSLSLSPGKGGGGSGGGGSGGGGSGGGGSGGGGSGGGGSDKTHTCPPCPAPELLGGPSVFLFPPKPKDTLMISRTPEVTCVVVDVSHEDPEVKFNWYVDGVEVHNAKTKPCEEQYGSTYRCVSVLTVLHQDWLNGKEYKCKVSNKALPAPIEKTISKAKGQPREPQVYTLPPSREEMTKNQVSLTCLVKGFYPSDIAVEWESNGQPENNYKTTPPVLDSDGSFFLYSKLTVDKSRWQQGNVFSCSVMHEALHNHYTQKSLSLSPGKGGGGQVQLQESGPGLVKPSETLSLTCTVSGGSISSSSYFWGWIRQPPGKCLEWIGNIYYSGSSNYNPSLKSRVTISVDTSKNQFSLKLSSVTAADTAVYYCARLPRGDRDAFDIWGQGTMVTVSSGGGGSGGGGSGGGGSDIVMTQSPSSLSASVGDRVTITCRASQGISNYLAWYQQKPGKVPKLLIYAASTLQSGVPSRFSGSGSGTDFTLTISSLQPEDFATYYCQQSYSTPFTFGCGTKVEIKSGGGGSEVQLVESGGGLVQPGGSLKLSCAASGFTFNKYAMNWVRQAPGKGMEWVARIRSKYNNYATYYADAVKDRFTISRDDSKNTLYLQMNNLKTEDTAVYYCVRAGNFGSSYISYFAYWGQGTLVTVSSGGGGSGGGGSGGGGSQTVVTQEPSLTVSPGGTVTITCGSSTGAVTSGNYPNWIQKKPGQAPRGLIGGTKFLAPGTPARFSGSLEGGKAALTLSGVQPEDEAEYYCVLYYSNRWVFGSGTKLTVL

SEQ ID NO: 253 - protein, 1506 aa, Artificial Sequence
  Synthetic
QVQLVQSGAEVKKPGASVKVSCKASGYTFTNYWMNWVRQAPGQCLEWMGNIAYGVKGTNYNQKFQGRVTMTVDTSSSTAYMELSRLRSDDTAVYYCATRYFYVMDYWGQGTLVTVSSGGGGSGGGGSGGGGSDIQMTQSPSSLSASVGDRVTITCRASQDISNYLNWYQQKPGKVPKLLIYYTSRLHSGVPSRFSGSGSGTDFTLTISSLQPEDVATYYCVQYAQFPLTFGCGTKVEIKSGGGGSEVQLVESGGGLVQPGGSLKLSCAASGFTFNKYAMNWVRQAPGKGMEWVARIRSKYNNYATYYADAVKDRFTISRDDSKNTLYLQMNNLKTEDTAVYYCVRAGNFGSSYISYFAYWGQGTLVTVSSGGGGSGGGGSGGGGSQTVVTQEPSLTVSPGGTVTITCGSSTGAVTSGNYPNWIQKKPGQAPRGLIGGTKFLAPGTPARFSGSLEGGKAALTLSGVQPEDEAEYYCVLYYSNRWVFGSGTKLTVLGGGGSGGGGSGGGGSDKTHTCPPCPAPELLGGPSVFLFPPKPKDTLMISRTPEVTCVVVDVSHEDPEVKFNWYVDGVEVHNAKTKPCEEQYGSTYRCVSVLTVLHQDWLNGKEYKCKVSNKALPAPIEKTISKAKGQPREPQVYTLPPSREEMTKNQVSLTCLVKGFYPSDIAVEWESNGQPENNYKTTPPVLDSDGSFFLYSKLTVDKSRWQQGNVFSCSVMHEALHNHYTQKSLSLSPGKGGGGSGGGGSGGGGSGGGGSGGGGSGGGGSDKTHTCPPCPAPELLGGPSVFLFPPKPKDTLMISRTPEVTCVVVDVSHEDPEVKFNWYVDGVEVHNAKTKPCEEQYGSTYRCVSVLTVLHQDWLNGKEYKCKVSNKALPAPIEKTISKAKGQPREPQVYTLPPSREEMTKNQVSLTCLVKGFYPSDIAVEWESNGQPENNYKTTPPVLDSDGSFFLYSKLTVDKSRWQQGNVFSCSVMHEALHNHYTQKSLSLSPGKGGGGSGGGGSGGGGSQVQLQESGPGLVKPSETLSLTCTVSGGSISSSSYFWGWIRQPPGKCLEWIGNIYYSGSSNYNPSLKSRVTISVDTSKNQFSLKLSSVTAADTAVYYCARLPRGDRDAFDIWGQGTMVTVSSGGGGSGGGGSGGGGSDIVMTQSPSSLSASVGDRVTITCRASQGISNYLAWYQQKPGKVPKLLIYAASTLQSGVPSRFSGSGSGTDFTLTISSLQPEDFATYYCQQSYSTPFTFGCGTKVEIKSGGGGSEVQLVESGGGLVQPGGSLKLSCAASGFTFNKYAMNWVRQAPGKGMEWVARIRSKYNNYATYYADAVKDRFTISRDDSKNTLYLQMNNLKTEDTAVYYCVRAGNFGSSYISYFAYWGQGTLVTVSSGGGGSGGGGSGGGGSQTVVTQEPSLTVSPGGTVTITCGSSTGAVTSGNYPNWIQKKPGQAPRGLIGGTKFLAPGTPARFSGSLEGGKAALTLSGVQPEDEAEYYCVLYYSNRWVFGSGTKLTVL

SEQ ID NO: 254 - protein, 1484 aa, Artificial Sequence
  Synthetic
QVQLVQSGAEVKKPGASVKVSCKASGYTFTNYWMNWVRQAPGQCLEWMGNIAYGVKGTNYNQKFQGRVTMTVDTSSSTAYMELSRLRSDDTAVYYCATRYFYVMDYWGQGTLVTVSSGGGGSGGGGSGGGGSDIQMTQSPSSLSASVGDRVTITCRASQDISNYLNWYQQKPGKVPKLLIYYTSRLHSGVPSRFSGSGSGTDFTLTISSLQPEDVATYYCVQYAQFPLTFGCGTKVEIKSGGGGSEVQLVESGGGLVQPGGSLKLSCAASGFTFNKYAINWVREAPGKGLEWVARIRSKYNNYATYYADAVKDRFTISRDDSKNTAYLQMNNLKTEDTAVYYCVRNANFGTSYISYFAYWGQGTLVTVSSGGGGSGGGGSGGGGSQTVVTQEPSLTVSPGGTVTLTCGSSTGAVTSGNYPNWVQKKPGQAPRGLIGGTKFLAPGTPARFSGSLLGGKAALTLSGVQPEDEAEYYCVLWYSNRWVFGSGTKLTVLGGGGDKTHTCPPCPAPELLGGPSVFLFPPKPKDTLMISRTPEVTCVVVDVSHEDPEVKFNWYVDGVEVHNAKTKPCEEQYGSTYRCVSVLTVLHQDWLNGKEYKCKVSNKALPAPIEKTISKAKGQPREPQVYTLPPSREEMTKNQVSLTCLVKGFYPSDIAVEWESNGQPENNYKTTPPVLDSDGSFFLYSKLTVDKSRWQQGNVFSCSVMHEALHNHYTQKSLSLSPGKGGGGSGGGGSGGGGSGGGGSGGGGSGGGGSDKTHTCPPCPAPELLGGPSVFLFPPKPKDTLMISRTPEVTCVVVDVSHEDPEVKFNWYVDGVEVHNAKTKPCEEQYGSTYRCVSVLTVLHQDWLNGKEYKCKVSNKALPAPIEKTISKAKGQPREPQVYTLPPSREEMTKNQVSLTCLVKGFYPSDIAVEWESNGQPENNYKTTPPVLDSDGSFFLYSKLTVDKSRWQQGNVFSCSVMHEALHNHYTQKSLSLSPGKGGGGQVQLQESGPGLVKPSETLSLTCTVSGGSISSSSYFWGWIRQPPGKCLEWIGNIYYSGSSNYNPSLKSRVTISVDTSKNQFSLKLSSVTAADTAVYYCARLPRGDRDAFDIWGQGTMVTVSSGGGGSGGGGSGGGGSDIVMTQSPSSLSASVGDRVTITCRASQGISNYLAWYQQKPGKVPKLLIYAASTLQSGVPSRFSGSGSGTDFTLTISSLQPEDFATYYCQQSYSTPFTFGCGTKVEIKSGGGGSEVQLVESGGGLVQPGGSLKLSCAASGFTFNKYAINWVREAPGKGLEWVARIRSKYNNYATYYADAVKDRFTISRDDSKNTAYLQMNNLKTEDTAVYYCVRNANFGTSYISYFAYWGQGTLVTVSSGGGGSGGGGSGGGGSQTVVTQEPSLTVSPGGTVTLTCGSSTGAVTSGNYPNWVQKKPGQAPRGLIGGTKFLAPGTPARFSGSLLGGKAALTLSGVQPEDEAEYYCVLWYSNRWVFGSGTKLTVL

SEQ ID NO: 255 - protein, 1496 aa, Artificial Sequence
  Synthetic
QVQLVQSGAEVKKPGASVKVSCKASGYTFTNYWMNWVRQAPGQCLEWMGNIAYGVKGTNYNQKFQGRVTMTVDTSSSTAYMELSRLRSDDTAVYYCATRYFYVMDYWGQGTLVTVSSGGGGQGGGGQGGGGQDIQMTQSPSSLSASVGDRVTITCRASQDISNYLNWYQQKPGKVPKLLIYYTSRLHSGVPSRFSGSGSGTDFTLTISSLQPEDVATYYCVQYAQFPLTFGCGTKVEIKSGGGGQEVQLVESGGGLVQPGGSLKLSCAASGFTFNKYAINWVREAPGKGLEWVARIRSKYNNYATYYADAVKDRFTISRDDSKNTAYLQMNNLKTEDTAVYYCVRNANFGTSYISYFAYWGQGTLVTVSSGGGGQGGGGQGGGGQQTVVTQEPSLTVSPGGTVTLTCGSSTGAVTSGNYPNWVQKKPGQAPRGLIGGTKFLAPGTPARFSGSLLGGKAALTLSGVQPEDEAEYYCVLWYSNRWVFGSGTKLTVLGGGGQGGGGQGGGGQCPPCPAPELLGGPSVFLFPPKPKDTLMISRTPEVTCVVVDVSHEEPEVKFNWYVDGVEVHNAKTKPCEEQYGSTYRCVSVLTVLHQDWLNGKEYKCKVSNKALPAPIEKTISKAKGQPREPQVYTLPPSREEMTKNQVSLTCLVKGFYPSDIAVEWESNGQPENNYKTTPPVLDSDGSFFLYSKLTVDKSRWQQGNVFSCSVMHEALHNHYTQKSLSLSPGKGGGGQGGGGQGGGGQGGGGQGGGGQGGGGQCPPCPAPELLGGPSVFLFPPKPKDTLMISRTPEVTCVVVDVSHEEPEVKFNWYVDGVEVHNAKTKPCEEQYGSTYRCVSVLTVLHQDWLNGKEYKCKVSNKALPAPIEKTISKAKGQPREPQVYTLPPSREEMTKNQVSLTCLVKGFYPSDIAVEWESNGQPENNYKTTPPVLDSDGSFFLYSKLTVDKSRWQQGNVFSCSVMHEALHNHYTQKSLSLSPGKGGGGQGGGGQGGGGQQVQLQESGPGLVKPSETLSLTCTVSGGSISSSSYFWGWIRQPPGKCLEWIGNIYYSGSSNYNPSLKSRVTISVDTSKNQFSLKLSSVTAADTAVYYCARLPRGDRDAFDIWGQGTMVTVSSGGGGQGGGGQGGGGQDIVMTQSPSSLSASVGDRVTITCRASQGISNYLAWYQQKPGKVPKLLIYAASTLQSGVPSRFSGSGSGTDFTLTISSLQPEDFATYYCQQSYSTPFTFGCGTKVEIKSGGGGQEVQLVESGGGLVQPGGSLKLSCAASGFTFNKYAINWVREAPGKGLEWVARIRSKYNNYATYYADAVKDRFTISRDDSKNTAYLQMNNLKTEDTAVYYCVRNANFGTSYISYFAYWGQGTLVTVSSGGGGQGGGGQGGGGQQTVVTQEPSLTVSPGGTVTLTCGSSTGAVTSGNYPNWVQKKPGQAPRGLIGGTKFLAPGTPARFSGSLLGGKAALTLSGVQPEDEAEYYCVLWYSNRWVFGSGTKLTVL

SEQ ID NO: 256 - protein, 1506 aa, Artificial Sequence
  Synthetic
QVQLVQSGAEVKKPGASVKVSCKASGYTFTNYWMNWVRQAPGQCLEWMGNIAYGVKGTNYNQKFQGRVTMTVDTSSSTAYMELSRLRSDDTAVYYCATRYFYVMDYWGQGTLVTVSSGGGGSGGGGSGGGGSDIQMTQSPSSLSASVGDRVTITCRASQDISNYLNWYQQKPGKVPKLLIYYTSRLHSGVPSRFSGSGSGTDFTLTISSLQPEDVATYYCVQYAQFPLTFGCGTKVEIKSGGGGSEVQLVESGGGLVQPGGSLKLSCAASGFTFNKYAINWVREAPGKGLEWVARIRSKYNNYATYYADAVKDRFTISRDDSKNTAYLQMNNLKTEDTAVYYCVRNANFGTSYISYFAYWGQGTLVTVSSGGGGSGGGGSGGGGSQTVVTQEPSLTVSPGGTVTLTCGSSTGAVTSGNYPNWVQKKPGQAPRGLIGGTKFLAPGTPARFSGSLLGGKAALTLSGVQPEDEAEYYCVLWYSNRWVFGSGTKLTVLGGGGSGGGGSGGGGSDKTHTCPPCPAPELLGGPSVFLFPPKPKDTLMISRTPEVTCVVVDVSHEDPEVKFNWYVDGVEVHNAKTKPCEEQYGSTYRCVSVLTVLHQDWLNGKEYKCKVSNKALPAPIEKTISKAKGQPREPQVYTLPPSREEMTKNQVSLTCLVKGFYPSDIAVEWESNGQPENNYKTTPPVLDSDGSFFLYSKLTVDKSRWQQGNVFSCSVMHEALHNHYTQKSLSLSPGKGGGGSGGGGSGGGGSGGGGSGGGGSGGGGSDKTHTCPPCPAPELLGGPSVFLFPPKPKDTLMISRTPEVTCVVVDVSHEDPEVKFNWYVDGVEVHNAKTKPCEEQYGSTYRCVSVLTVLHQDWLNGKEYKCKVSNKALPAPIEKTISKAKGQPREPQVYTLPPSREEMTKNQVSLTCLVKGFYPSDIAVEWESNGQPENNYKTTPPVLDSDGSFFLYSKLTVDKSRWQQGNVFSCSVMHEALHNHYTQKSLSLSPGKGGGGSGGGGSGGGGSQVQLQESGPGLVKPSETLSLTCTVSGGSISSSSYFWGWIRQPPGKCLEWIGNIYYSGSSNYNPSLKSRVTISVDTSKNQFSLKLSSVTAADTAVYYCARLPRGDRDAFDIWGQGTMVTVSSGGGGSGGGGSGGGGSDIVMTQSPSSLSASVGDRVTITCRASQGISNYLAWYQQKPGKVPKLLIYAASTLQSGVPSRFSGSGSGTDFTLTISSLQPEDFATYYCQQSYSTPFTFGCGTKVEIKSGGGGSEVQLVESGGGLVQPGGSLKLSCAASGFTFNKYAINWVREAPGKGLEWVARIRSKYNNYATYYADAVKDRFTISRDDSKNTAYLQMNNLKTEDTAVYYCVRNANFGTSYISYFAYWGQGTLVTVSSGGGGSGGGGSGGGGSQTVVTQEPSLTVSPGGTVTLTCGSSTGAVTSGNYPNWVQKKPGQAPRGLIGGTKFLAPGTPARFSGSLLGGKAALTLSGVQPEDEAEYYCVLWYSNRWVFGSGTKLTVL

SEQ ID NO: 257 - protein, 1474 aa, Artificial Sequence
  Synthetic
QVQLVQSGAEVKKPGASVKVSCKASGYTFTNYWMNWVRQAPGQCLEWMGNIAYGVKGTNYNQKFQGRVTMTVDTSSSTAYMELSRLRSDDTAVYYCATRYFYVMDYWGQGTLVTVSSGGGGQGGGGQGGGGQDIQMTQSPSSLSASVGDRVTITCRASQDISNYLNWYQQKPGKVPKLLIYYTSRLHSGVPSRFSGSGSGTDFTLTISSLQPEDVATYYCVQYAQFPLTFGCGTKVEIKSGGGGQEVQLVESGGGLVQPGGSLKLSCAASGFTFNKYAINWVREAPGKGLEWVARIRSKYNNYATYYADAVKDRFTISRDDSKNTAYLQMNNLKTEDTAVYYCVRNANFGTSYISYFAYWGQGTLVTVSSGGGGQGGGGQGGGGQQTVVTQEPSLTVSPGGTVTLTCGSSTGAVTSGNYPNWVQKKPGQAPRGLIGGTKFLAPGTPARFSGSLLGGKAALTLSGVQPEDEAEYYCVLWYSNRWVFGSGTKLTVLGGGGCPPCPAPELLGGPSVFLFPPKPKDTLMISRTPEVTCVVVDVSHEEPEVKFNWYVDGVEVHNAKTKPCEEQYGSTYRCVSVLTVLHQDWLNGKEYKCKVSNKALPAPIEKTISKAKGQPREPQVYTLPPSREEMTKNQVSLTCLVKGFYPSDIAVEWESNGQPENNYKTTPPVLDSDGSFFLYSKLTVDKSRWQQGNVFSCSVMHEALHNHYTQKSLSLSPGKGGGGQGGGGQGGGGQGGGGQGGGGQGGGGQCPPCPAPELLGGPSVFLFPPKPKDTLMISRTPEVTCVVVDVSHEEPEVKFNWYVDGVEVHNAKTKPCEEQYGSTYRCVSVLTVLHQDWLNGKEYKCKVSNKALPAPIEKTISKAKGQPREPQVYTLPPSREEMTKNQVSLTCLVKGFYPSDIAVEWESNGQPENNYKTTPPVLDSDGSFFLYSKLTVDKSRWQQGNVFSCSVMHEALHNHYTQKSLSLSPGKGGGGQVQLQESGPGLVKPSETLSLTCTVSGGSISSSSYFWGWIRQPPGKCLEWIGNIYYSGSSNYNPSLKSRVTISVDTSKNQFSLKLSSVTAADTAVYYCARLPRGDRDAFDIWGQGTMVTVSSGGGGQGGGGQGGGGQDIVMTQSPSSLSASVGDRVTITCRASQGISNYLAWYQQKPGKVPKLLIYAASTLQSGVPSRFSGSGSGTDFTLTISSLQPEDFATYYCQQSYSTPFTFGCGTKVEIKSGGGGQEVQLVESGGGLVQPGGSLKLSCAASGFTFNKYAINWVREAPGKGLEWVARIRSKYNNYATYYADAVKDRFTISRDDSKNTAYLQMNNLKTEDTAVYYCVRNANFGTSYISYFAYWGQGTLVTVSSGGGGQGGGGQGGGGQQTVVTQEPSLTVSPGGTVTLTCGSSTGAVTSGNYPNWVQKKPGQAPRGLIGGTKFLAPGTPARFSGSLLGGKAALTLSGVQPEDEAEYYCVLWYSNRWVFGSGTKLTVL

SEQ ID NO: 258 - protein, 1506 aa, Artificial Sequence
  Synthetic
QVQLVQSGAEVKKPGASVKVSCKASGYTFTNYWMNWVRQAPGQCLEWMGNIAYGVKGTNYNQKFQGRVTMTVDTSSSTAYMELSRLRSDDTAVYYCATRYFYVMDYWGQGTLVTVSSGGGGSGGGGSGGGGSDIQMTQSPSSLSASVGDRVTITCRASQDISNYLNWYQQKPGKVPKLLIYYTSRLHSGVPSRFSGSGSGTDFTLTISSLQPEDVATYYCVQYAQFPLTFGCGTKVEIKSGGGGSEVQLVESGGGLVQPGGSLKLSCAASGFTFNKYAMNWVRQAPGKCLEWVARIRSKYNNYATYYADSVKDRFTISRDDSKNTAYLQMNNLKTEDTAVYYCVRHGNFGNSYISYWAYWGQGTLVTVSSGGGGSGGGGSGGGGSQTVVTQEPSLTVSPGGTVTLTCGSSTGAVTSGNYPNWVQQKPGQAPRGLIGGTKFLAPGTPARFSGSLLGGKAALTLSGVQPEDEAEYYCVLWYSNRWVFGCGTKLTVLGGGGSGGGGSGGGGSDKTHTCPPCPAPELLGGPSVFLFPPKPKDTLMISRTPEVTCVVVDVSHEDPEVKFNWYVDGVEVHNAKTKPCEEQYGSTYRCVSVLTVLHQDWLNGKEYKCKVSNKALPAPIEKTISKAKGQPREPQVYTLPPSREEMTKNQVSLTCLVKGFYPSDIAVEWESNGQPENNYKTTPPVLDSDGSFFLYSKLTVDKSRWQQGNVFSCSVMHEALHNHYTQKSLSLSPGKGGGGSGGGGSGGGGSGGGGSGGGGSGGGGSDKTHTCPPCPAPELLGGPSVFLFPPKPKDTLMISRTPEVTCVVVDVSHEDPEVKFNWYVDGVEVHNAKTKPCEEQYGSTYRCVSVLTVLHQDWLNGKEYKCKVSNKALPAPIEKTISKAKGQPREPQVYTLPPSREEMTKNQVSLTCLVKGFYPSDIAVEWESNGQPENNYKTTPPVLDSDGSFFLYSKLTVDKSRWQQGNVFSCSVMHEALHNHYTQKSLSLSPGKGGGGSGGGGSGGGGSQVQLQESGPGLVKPSETLSLTCTVSGGSISSSSYFWGWIRQPPGKCLEWIGNIYYSGSSNYNPSLKSRVTISVDTSKNQFSLKLSSVTAADTAVYYCARLPRGDRDAFDIWGQGTMVTVSSGGGGSGGGGSGGGGSDIVMTQSPSSLSASVGDRVTITCRASQGISNYLAWYQQKPGKVPKLLIYAASTLQSGVPSRFSGSGSGTDFTLTISSLQPEDFATYYCQQSYSTPFTFGCGTKVEIKSGGGGSEVQLVESGGGLVQPGGSLKLSCAASGFTFNKYAMNWVRQAPGKCLEWVARIRSKYNNYATYYADSVKDRFTISRDDSKNTAYLQMNNLKTEDTAVYYCVRHGNFGNSYISYWAYWGQGTLVTVSSGGGGSGGGGSGGGGSQTVVTQEPSLTVSPGGTVTLTCGSSTGAVTSGNYPNWVQQKPGQAPRGLIGGTKFLAPGTPARFSGSLLGGKAALTLSGVQPEDEAEYYCVLWYSNRWVFGCGTKLTVL

SEQ ID NO: 259 - protein, 1506 aa, Artificial Sequence
  Synthetic
QVQLVQSGAEVKKPGASVKVSCKASGYTFTNYWMNWVRQAPGQCLEWMGNIHSKAHGTNYNQKFQGRVTMTVDTSSSTAYMELSRLRSDDTAVYYCATRYFYVMDYWGQGTLVTVSSGGGGSGGGGSGGGGSDIQMTQSPSSLSASVGDRVTITCRASQDISNYLNWYQQKPGKVPKLLIYYTSRLHSGVPSRFSGSGSGTDFTLTISSLQPEDVATYYCVQYAQFPLTFGCGTKVEIKSGGGGSEVQLVESGGGLVQPGGSLKLSCAASGFTFNKYAMNWVRQAPGKGMEWVARIRSKYNNYATYYADAVKDRFTISRDDSKNTLYLQMNNLKTEDTAVYYCVRAGNFGSSYISYFAYWGQGTLVTVSSGGGGSGGGGSGGGGSQTVVTQEPSLTVSPGGTVTITCGSSTGAVTSGNYPNWIQKKPGQAPRGLIGGTKFLAPGTPARFSGSLEGGKAALTLSGVQPEDEAEYYCVLYYSNRWVFGSGTKLTVLGGGGSGGGGSGGGGSDKTHTCPPCPAPELLGGPSVFLFPPKPKDTLMISRTPEVTCVVVDVSHEDPEVKFNWYVDGVEVHNAKTKPCEEQYGSTYRCVSVLTVLHQDWLNGKEYKCKVSNKALPAPIEKTISKAKGQPREPQVYTLPPSREEMTKNQVSLTCLVKGFYPSDIAVEWESNGQPENNYKTTPPVLDSDGSFFLYSKLTVDKSRWQQGNVFSCSVMHEALHNHYTQKSLSLSPGKGGGGSGGGGSGGGGSGGGGSGGGGSGGGGSDKTHTCPPCPAPELLGGPSVFLFPPKPKDTLMISRTPEVTCVVVDVSHEDPEVKFNWYVDGVEVHNAKTKPCEEQYGSTYRCVSVLTVLHQDWLNGKEYKCKVSNKALPAPIEKTISKAKGQPREPQVYTLPPSREEMTKNQVSLTCLVKGFYPSDIAVEWESNGQPENNYKTTPPVLDSDGSFFLYSKLTVDKSRWQQGNVFSCSVMHEALHNHYTQKSLSLSPGKGGGGSGGGGSGGGGSQVQLQESGPGLVKPSETLSLTCTVSGGSISSSSYFWGWIRQPPGKCLEWIGNIYYSGSSNYNPSLKSRVTISVDTSKNQFSLKLSSVTAADTAVYYCARLPRGDRDAFDIWGQGTMVTVSSGGGGSGGGGSGGGGSDIVMTQSPSSLSASVGDRVTITCRASQGISNYLAWYQQKPGKVPKLLIYAASTLQSGVPSRFSGSGSGTDFTLTISSLQPEDFATYYCQQSYSTPFTFGCGTKVEIKSGGGGSEVQLVESGGGLVQPGGSLKLSCAASGFTFNKYAMNWVRQAPGKGMEWVARIRSKYNNYATYYADAVKDRFTISRDDSKNTLYLQMNNLKTEDTAVYYCVRAGNFGSSYISYFAYWGQGTLVTVSSGGGGSGGGGSGGGGSQTVVTQEPSLTVSPGGTVTITCGSSTGAVTSGNYPNWIQKKPGQAPRGLIGGTKFLAPGTPARFSGSLEGGKAALTLSGVQPEDEAEYYCVLYYSNRWVFGSGTKLTVL

SEQ ID NO: 260 - protein, 1474 aa, Artificial Sequence
  Synthetic
QVQLVQSGAEVKKPGASVKVSCKASGYTFTNYWMNWVRQAPGQCLEWMGNIHSKAHGTNYNQKFQGRVTMTVDTSSSTAYMELSRLRSDDTAVYYCATRYFYVMDYWGQGTLVTVSSGGGGQGGGGQGGGGQDIQMTQSPSSLSASVGDRVTITCRASQDISNYLNWYQQKPGKVPKLLIYYTSRLHSGVPSRFSGSGSGTDFTLTISSLQPEDVATYYCVQYAQFPLTFGCGTKVEIKSGGGGQEVQLVESGGGLVQPGGSLKLSCAASGFTFNKYAMNWVRQAPGKGMEWVARIRSKYNNYATYYADAVKDRFTISRDDSKNTLYLQMNNLKTEDTAVYYCVRAGNFGSSYISYFAYWGQGTLVTVSSGGGGQGGGGQGGGGQQTVVTQEPSLTVSPGGTVTITCGSSTGAVTSGNYPNWIQKKPGQAPRGLIGGTKFLAPGTPARFSGSLEGGKAALTLSGVQPEDEAEYYCVLYYSNRWVFGSGTKLTVLGGGGCPPCPAPELLGGPSVFLFPPKPKDTLMISRTPEVTCVVVDVSHEEPEVKFNWYVDGVEVHNAKTKPCEEQYGSTYRCVSVLTVLHQDWLNGKEYKCKVSNKALPAPIEKTISKAKGQPREPQVYTLPPSREEMTKNQVSLTCLVKGFYPSDIAVEWESNGQPENNYKTTPPVLDSDGSFFLYSKLTVDKSRWQQGNVFSCSVMHEALHNHYTQKSLSLSPGKGGGGQGGGGQGGGGQGGGGQGGGGQGGGGQCPPCPAPELLGGPSVFLFPPKPKDTLMISRTPEVTCVVVDVSHEEPEVKFNWYVDGVEVHNAKTKPCEEQYGSTYRCVSVLTVLHQDWLNGKEYKCKVSNKALPAPIEKTISKAKGQPREPQVYTLPPSREEMTKNQVSLTCLVKGFYPSDIAVEWESNGQPENNYKTTPPVLDSDGSFFLYSKLTVDKSRWQQGNVFSCSVMHEALHNHYTQKSLSLSPGKGGGGQVQLQESGPGLVKPSETLSLTCTVSGGSISSSSYFWGWIRQPPGKCLEWIGNIYYSGSSNYNPSLKSRVTISVDTSKNQFSLKLSSVTAADTAVYYCARLPRGDRDAFDIWGQGTMVTVSSGGGGQGGGGQGGGGQDIVMTQSPSSLSASVGDRVTITCRASQGISNYLAWYQQKPGKVPKLLIYAASTLQSGVPSRFSGSGSGTDFTLTISSLQPEDFATYYCQQSYSTPFTFGCGTKVEIKSGGGGQEVQLVESGGGLVQPGGSLKLSCAASGFTFNKYAMNWVRQAPGKGMEWVARIRSKYNNYATYYADAVKDRFTISRDDSKNTLYLQMNNLKTEDTAVYYCVRAGNFGSSYISYFAYWGQGTLVTVSSGGGGQGGGGQGGGGQQTVVTQEPSLTVSPGGTVTITCGSSTGAVTSGNYPNWIQKKPGQAPRGLIGGTKFLAPGTPARFSGSLEGGKAALTLSGVQPEDEAEYYCVLYYSNRWVFGSGTKLTVL

SEQ ID NO: 261 - protein, 1484 aa, Artificial Sequence
  Synthetic
QVQLVQSGAEVKKPGASVKVSCKASGYTFTNYWMNWVRQAPGQCLEWMGNIHSKAHGTNYNQKFQGRVTMTVDTSSSTAYMELSRLRSDDTAVYYCATRYFYVMDYWGQGTLVTVSSGGGGSGGGGSGGGGSDIQMTQSPSSLSASVGDRVTITCRASQDISNYLNWYQQKPGKVPKLLIYYTSRLHSGVPSRFSGSGSGTDFTLTISSLQPEDVATYYCVQYAQFPLTFGCGTKVEIKSGGGGSEVQLVESGGGLVQPGGSLKLSCAASGFTFNKYAINWVREAPGKGLEWVARIRSKYNNYATYYADAVKDRFTISRDDSKNTAYLQMNNLKTEDTAVYYCVRNANFGTSYISYFAYWGQGTLVTVSSGGGGSGGGGSGGGGSQTVVTQEPSLTVSPGGTVTLTCGSSTGAVTSGNYPNWVQKKPGQAPRGLIGGTKFLAPGTPARFSGSLLGGKAALTLSGVQPEDEAEYYCVLWYSNRWVFGSGTKLTVLGGGGDKTHTCPPCPAPELLGGPSVFLFPPKPKDTLMISRTPEVTCVVVDVSHEDPEVKFNWYVDGVEVHNAKTKPCEEQYGSTYRCVSVLTVLHQDWLNGKEYKCKVSNKALPAPIEKTISKAKGQPREPQVYTLPPSREEMTKNQVSLTCLVKGFYPSDIAVEWESNGQPENNYKTTPPVLDSDGSFFLYSKLTVDKSRWQQGNVFSCSVMHEALHNHYTQKSLSLSPGKGGGGSGGGGSGGGGSGGGGSGGGGSGGGGSDKTHTCPPCPAPELLGGPSVFLFPPKPKDTLMISRTPEVTCVVVDVSHEDPEVKFNWYVDGVEVHNAKTKPCEEQYGSTYRCVSVLTVLHQDWLNGKEYKCKVSNKALPAPIEKTISKAKGQPREPQVYTLPPSREEMTKNQVSLTCLVKGFYPSDIAVEWESNGQPENNYKTTPPVLDSDGSFFLYSKLTVDKSRWQQGNVFSCSVMHEALHNHYTQKSLSLSPGKGGGGQVQLQESGPGLVKPSETLSLTCTVSGGSISSSSYFWGWIRQPPGKCLEWIGNIYYSGSSNYNPSLKSRVTISVDTSKNQFSLKLSSVTAADTAVYYCARLPRGDRDAFDIWGQGTMVTVSSGGGGSGGGGSGGGGSDIVMTQSPSSLSASVGDRVTITCRASQGISNYLAWYQQKPGKVPKLLIYAASTLQSGVPSRFSGSGSGTDFTLTISSLQPEDFATYYCQQSYSTPFTFGCGTKVEIKSGGGGSEVQLVESGGGLVQPGGSLKLSCAASGFTFNKYAINWVREAPGKGLEWVARIRSKYNNYATYYADAVKDRFTISRDDSKNTAYLQMNNLKTEDTAVYYCVRNANFGTSYISYFAYWGQGTLVTVSSGGGGSGGGGSGGGGSQTVVTQEPSLTVSPGGTVTLTCGSSTGAVTSGNYPNWVQKKPGQAPRGLIGGTKFLAPGTPARFSGSLLGGKAALTLSGVQPEDEAEYYCVLWYSNRWVFGSGTKLTVL

SEQ ID NO: 262 - protein, 1474 aa, Artificial Sequence
  Synthetic
QVQLVQSGAEVKKPGASVKVSCKASGYTFTNYWMNWVRQAPGQCLEWMGNIHSKAHGTNYNQKFQGRVTMTVDTSSSTAYMELSRLRSDDTAVYYCATRYFYVMDYWGQGTLVTVSSGGGGQGGGGQGGGGQDIQMTQSPSSLSASVGDRVTITCRASQDISNYLNWYQQKPGKVPKLLIYYTSRLHSGVPSRFSGSGSGTDFTLTISSLQPEDVATYYCVQYAQFPLTFGCGTKVEIKSGGGGQEVQLVESGGGLVQPGGSLKLSCAASGFTFNKYAINWVREAPGKGLEWVARIRSKYNNYATYYADAVKDRFTISRDDSKNTAYLQMNNLKTEDTAVYYCVRNANFGTSYISYFAYWGQGTLVTVSSGGGGQGGGGQGGGGQQTVVTQEPSLTVSPGGTVTLTCGSSTGAVTSGNYPNWVQKKPGQAPRGLIGGTKFLAPGTPARFSGSLLGGKAALTLSGVQPEDEAEYYCVLWYSNRWVFGSGTKLTVLGGGGCPPCPAPELLGGPSVFLFPPKPKDTLMISRTPEVTCVVVDVSHEEPEVKFNWYVDGVEVHNAKTKPCEEQYGSTYRCVSVLTVLHQDWLNGKEYKCKVSNKALPAPIEKTISKAKGQPREPQVYTLPPSREEMTKNQVSLTCLVKGFYPSDIAVEWESNGQPENNYKTTPPVLDSDGSFFLYSKLTVDKSRWQQGNVFSCSVMHEALHNHYTQKSLSLSPGKGGGGQGGGGQGGGGQGGGGQGGGGQGGGGQCPPCPAPELLGGPSVFLFPPKPKDTLMISRTPEVTCVVVDVSHEEPEVKFNWYVDGVEVHNAKTKPCEEQYGSTYRCVSVLTVLHQDWLNGKEYKCKVSNKALPAPIEKTISKAKGQPREPQVYTLPPSREEMTKNQVSLTCLVKGFYPSDIAVEWESNGQPENNYKTTPPVLDSDGSFFLYSKLTVDKSRWQQGNVFSCSVMHEALHNHYTQKSLSLSPGKGGGGQVQLQESGPGLVKPSETLSLTCTVSGGSISSSSYFWGWIRQPPGKCLEWIGNIYYSGSSNYNPSLKSRVTISVDTSKNQFSLKLSSVTAADTAVYYCARLPRGDRDAFDIWGQGTMVTVSSGGGGQGGGGQGGGGQDIVMTQSPSSLSASVGDRVTITCRASQGISNYLAWYQQKPGKVPKLLIYAASTLQSGVPSRFSGSGSGTDFTLTISSLQPEDFATYYCQQSYSTPFTFGCGTKVEIKSGGGGQEVQLVESGGGLVQPGGSLKLSCAASGFTFNKYAINWVREAPGKGLEWVARIRSKYNNYATYYADAVKDRFTISRDDSKNTAYLQMNNLKTEDTAVYYCVRNANFGTSYISYFAYWGQGTLVTVSSGGGGQGGGGQGGGGQQTVVTQEPSLTVSPGGTVTLTCGSSTGAVTSGNYPNWVQKKPGQAPRGLIGGTKFLAPGTPARFSGSLLGGKAALTLSGVQPEDEAEYYCVLWYSNRWVFGSGTKLTVL

SEQ ID NO: 263 - protein, 1496 aa, Artificial Sequence
  Synthetic
QVQLVQSGAEVKKPGASVKVSCKASGYTFTNYWMNWVRQAPGQCLEWMGNIHSKAHGTNYNQKFQGRVTMTVDTSSSTAYMELSRLRSDDTAVYYCATRYFYVMDYWGQGTLVTVSSGGGGQGGGGQGGGGQDIQMTQSPSSLSASVGDRVTITCRASQDISNYLNWYQQKPGKVPKLLIYYTSRLHSGVPSRFSGSGSGTDFTLTISSLQPEDVATYYCVQYAQFPLTFGCGTKVEIKSGGGGQEVQLVESGGGLVQPGGSLKLSCAASGFTFNKYAMNWVRQAPGKGMEWVARIRSKYNNYATYYADAVKDRFTISRDDSKNTLYLQMNNLKTEDTAVYYCVRAGNFGSSYISYFAYWGQGTLVTVSSGGGGQGGGGQGGGGQQTVVTQEPSLTVSPGGTVTITCGSSTGAVTSGNYPNWIQKKPGQAPRGLIGGTKFLAPGTPARFSGSLEGGKAALTLSGVQPEDEAEYYCVLYYSNRWVFGSGTKLTVLGGGGQGGGGQGGGGQCPPCPAPELLGGPSVFLFPPKPKDTLMISRTPEVTCVVVDVSHEEPEVKFNWYVDGVEVHNAKTKPCEEQYGSTYRCVSVLTVLHQDWLNGKEYKCKVSNKALPAPIEKTISKAKGQPREPQVYTLPPSREEMTKNQVSLTCLVKGFYPSDIAVEWESNGQPENNYKTTPPVLDSDGSFFLYSKLTVDKSRWQQGNVFSCSVMHEALHNHYTQKSLSLSPGKGGGGQGGGGQGGGGQGGGGQGGGGQGGGGQCPPCPAPELLGGPSVFLFPPKPKDTLMISRTPEVTCVVVDVSHEEPEVKFNWYVDGVEVHNAKTKPCEEQYGSTYRCVSVLTVLHQDWLNGKEYKCKVSNKALPAPIEKTISKAKGQPREPQVYTLPPSREEMTKNQVSLTCLVKGFYPSDIAVEWESNGQPENNYKTTPPVLDSDGSFFLYSKLTVDKSRWQQGNVFSCSVMHEALHNHYTQKSLSLSPGKGGGGQGGGGQGGGGQQVQLQESGPGLVKPSETLSLTCTVSGGSISSSSYFWGWIRQPPGKCLEWIGNIYYSGSSNYNPSLKSRVTISVDTSKNQFSLKLSSVTAADTAVYYCARLPRGDRDAFDIWGQGTMVTVSSGGGGQGGGGQGGGGQDIVMTQSPSSLSASVGDRVTITCRASQGISNYLAWYQQKPGKVPKLLIYAASTLQSGVPSRFSGSGSGTDFTLTISSLQPEDFATYYCQQSYSTPFTFGCGTKVEIKSGGGGQEVQLVESGGGLVQPGGSLKLSCAASGFTFNKYAMNWVRQAPGKGMEWVARIRSKYNNYATYYADAVKDRFTISRDDSKNTLYLQMNNLKTEDTAVYYCVRAGNFGSSYISYFAYWGQGTLVTVSSGGGGQGGGGQGGGGQQTVVTQEPSLTVSPGGTVTITCGSSTGAVTSGNYPNWIQKKPGQAPRGLIGGTKFLAPGTPARFSGSLEGGKAALTLSGVQPEDEAEYYCVLYYSNRWVFGSGTKLTVL

SEQ ID NO: 264 - protein, 1484 aa, Artificial Sequence
  Synthetic
QVQLVQSGAEVKKPGASVKVSCKASGYTFTNYWMNWVRQAPGQCLEWMGNIHSKAHGTNYNQKFQGRVTMTVDTSSSTAYMELSRLRSDDTAVYYCATRYFYVMDYWGQGTLVTVSSGGGGSGGGGSGGGGSDIQMTQSPSSLSASVGDRVTITCRASQDISNYLNWYQQKPGKVPKLLIYYTSRLHSGVPSRFSGSGSGTDFTLTISSLQPEDVATYYCVQYAQFPLTFGCGTKVEIKSGGGGSEVQLVESGGGLVQPGGSLKLSCAASGFTFNKYAMNWVRQAPGKGMEWVARIRSKYNNYATYYADAVKDRFTISRDDSKNTLYLQMNNLKTEDTAVYYCVRAGNFGSSYISYFAYWGQGTLVTVSSGGGGSGGGGSGGGGSQTVVTQEPSLTVSPGGTVTITCGSSTGAVTSGNYPNWIQKKPGQAPRGLIGGTKFLAPGTPARFSGSLEGGKAALTLSGVQPEDEAEYYCVLYYSNRWVFGSGTKLTVLGGGGDKTHTCPPCPAPELLGGPSVFLFPPKPKDTLMISRTPEVTCVVVDVSHEDPEVKFNWYVDGVEVHNAKTKPCEEQYGSTYRCVSVLTVLHQDWLNGKEYKCKVSNKALPAPIEKTISKAKGQPREPQVYTLPPSREEMTKNQVSLTCLVKGFYPSDIAVEWESNGQPENNYKTTPPVLDSDGSFFLYSKLTVDKSRWQQGNVFSCSVMHEALHNHYTQKSLSLSPGKGGGGSGGGGSGGGGSGGGGSGGGGSGGGGSDKTHTCPPCPAPELLGGPSVFLFPPKPKDTLMISRTPEVTCVVVDVSHEDPEVKFNWYVDGVEVHNAKTKPCEEQYGSTYRCVSVLTVLHQDWLNGKEYKCKVSNKALPAPIEKTISKAKGQPREPQVYTLPPSREEMTKNQVSLTCLVKGFYPSDIAVEWESNGQPENNYKTTPPVLDSDGSFFLYSKLTVDKSRWQQGNVFSCSVMHEALHNHYTQKSLSLSPGKGGGGQVQLQESGPGLVKPSETLSLTCTVSGGSISSSSYFWGWIRQPPGKCLEWIGNIYYSGSSNYNPSLKSRVTISVDTSKNQFSLKLSSVTAADTAVYYCARLPRGDRDAFDIWGQGTMVTVSSGGGGSGGGGSGGGGSDIVMTQSPSSLSASVGDRVTITCRASQGISNYLAWYQQKPGKVPKLLIYAASTLQSGVPSRFSGSGSGTDFTLTISSLQPEDFATYYCQQSYSTPFTFGCGTKVEIKSGGGGSEVQLVESGGGLVQPGGSLKLSCAASGFTFNKYAMNWVRQAPGKGMEWVARIRSKYNNYATYYADAVKDRFTISRDDSKNTLYLQMNNLKTEDTAVYYCVRAGNFGSSYISYFAYWGQGTLVTVSSGGGGSGGGGSGGGGSQTVVTQEPSLTVSPGGTVTITCGSSTGAVTSGNYPNWIQKKPGQAPRGLIGGTKFLAPGTPARFSGSLEGGKAALTLSGVQPEDEAEYYCVLYYSNRWVFGSGTKLTVL

SEQ ID NO: 265 - protein, 1496 aa, Artificial Sequence
  Synthetic
QVQLVQSGAEVKKPGASVKVSCKASGYTFTNYWMNWVRQAPGQCLEWMGNIHSKAHGTNYNQKFQGRVTMTVDTSSSTAYMELSRLRSDDTAVYYCATRYFYVMDYWGQGTLVTVSSGGGGQGGGGQGGGGQDIQMTQSPSSLSASVGDRVTITCRASQDISNYLNWYQQKPGKVPKLLIYYTSRLHSGVPSRFSGSGSGTDFTLTISSLQPEDVATYYCVQYAQFPLTFGCGTKVEIKSGGGGQEVQLVESGGGLVQPGGSLKLSCAASGFTFNKYAINWVREAPGKGLEWVARIRSKYNNYATYYADAVKDRFTISRDDSKNTAYLQMNNLKTEDTAVYYCVRNANFGTSYISYFAYWGQGTLVTVSSGGGGQGGGGQGGGGQQTVVTQEPSLTVSPGGTVTLTCGSSTGAVTSGNYPNWVQKKPGQAPRGLIGGTKFLAPGTPARFSGSLLGGKAALTLSGVQPEDEAEYYCVLWYSNRWVFGSGTKLTVLGGGGQGGGGQGGGGQCPPCPAPELLGGPSVFLFPPKPKDTLMISRTPEVTCVVVDVSHEEPEVKFNWYVDGVEVHNAKTKPCEEQYGSTYRCVSVLTVLHQDWLNGKEYKCKVSNKALPAPIEKTISKAKGQPREPQVYTLPPSREEMTKNQVSLTCLVKGFYPSDIAVEWESNGQPENNYKTTPPVLDSDGSFFLYSKLTVDKSRWQQGNVFSCSVMHEALHNHYTQKSLSLSPGKGGGGQGGGGQGGGGQGGGGQGGGGQGGGGQCPPCPAPELLGGPSVFLFPPKPKDTLMISRTPEVTCVVVDVSHEEPEVKFNWYVDGVEVHNAKTKPCEEQYGSTYRCVSVLTVLHQDWLNGKEYKCKVSNKALPAPIEKTISKAKGQPREPQVYTLPPSREEMTKNQVSLTCLVKGFYPSDIAVEWESNGQPENNYKTTPPVLDSDGSFFLYSKLTVDKSRWQQGNVFSCSVMHEALHNHYTQKSLSLSPGKGGGGQGGGGQGGGGQQVQLQESGPGLVKPSETLSLTCTVSGGSISSSSYFWGWIRQPPGKCLEWIGNIYYSGSSNYNPSLKSRVTISVDTSKNQFSLKLSSVTAADTAVYYCARLPRGDRDAFDIWGQGTMVTVSSGGGGQGGGGQGGGGQDIVMTQSPSSLSASVGDRVTITCRASQGISNYLAWYQQKPGKVPKLLIYAASTLQSGVPSRFSGSGSGTDFTLTISSLQPEDFATYYCQQSYSTPFTFGCGTKVEIKSGGGGQEVQLVESGGGLVQPGGSLKLSCAASGFTFNKYAINWVREAPGKGLEWVARIRSKYNNYATYYADAVKDRFTISRDDSKNTAYLQMNNLKTEDTAVYYCVRNANFGTSYISYFAYWGQGTLVTVSSGGGGQGGGGQGGGGQQTVVTQEPSLTVSPGGTVTLTCGSSTGAVTSGNYPNWVQKKPGQAPRGLIGGTKFLAPGTPARFSGSLLGGKAALTLSGVQPEDEAEYYCVLWYSNRWVFGSGTKLTVL

SEQ ID NO: 266 - protein, 1506 aa, Artificial Sequence
  Synthetic
QVQLVQSGAEVKKPGASVKVSCKASGYTFTNYWMNWVRQAPGQCLEWMGNIHSKAHGTNYNQKFQGRVTMTVDTSSSTAYMELSRLRSDDTAVYYCATRYFYVMDYWGQGTLVTVSSGGGGSGGGGSGGGGSDIQMTQSPSSLSASVGDRVTITCRASQDISNYLNWYQQKPGKVPKLLIYYTSRLHSGVPSRFSGSGSGTDFTLTISSLQPEDVATYYCVQYAQFPLTFGCGTKVEIKSGGGGSEVQLVESGGGLVQPGGSLKLSCAASGFTFNKYAINWVREAPGKGLEWVARIRSKYNNYATYYADAVKDRFTISRDDSKNTAYLQMNNLKTEDTAVYYCVRNANFGTSYISYFAYWGQGTLVTVSSGGGGSGGGGSGGGGSQTVVTQEPSLTVSPGGTVTLTCGSSTGAVTSGNYPNWVQKKPGQAPRGLIGGTKFLAPGTPARFSGSLLGGKAALTLSGVQPEDEAEYYCVLWYSNRWVFGSGTKLTVLGGGGSGGGGSGGGGSDKTHTCPPCPAPELLGGPSVFLFPPKPKDTLMISRTPEVTCVVVDVSHEDPEVKFNWYVDGVEVHNAKTKPCEEQYGSTYRCVSVLTVLHQDWLNGKEYKCKVSNKALPAPIEKTISKAKGQPREPQVYTLPPSREEMTKNQVSLTCLVKGFYPSDIAVEWESNGQPENNYKTTPPVLDSDGSFFLYSKLTVDKSRWQQGNVFSCSVMHEALHNHYTQKSLSLSPGKGGGGSGGGGSGGGGSGGGGSGGGGSGGGGSDKTHTCPPCPAPELLGGPSVFLFPPKPKDTLMISRTPEVTCVVVDVSHEDPEVKFNWYVDGVEVHNAKTKPCEEQYGSTYRCVSVLTVLHQDWLNGKEYKCKVSNKALPAPIEKTISKAKGQPREPQVYTLPPSREEMTKNQVSLTCLVKGFYPSDIAVEWESNGQPENNYKTTPPVLDSDGSFFLYSKLTVDKSRWQQGNVFSCSVMHEALHNHYTQKSLSLSPGKGGGGSGGGGSGGGGSQVQLQESGPGLVKPSETLSLTCTVSGGSISSSSYFWGWIRQPPGKCLEWIGNIYYSGSSNYNPSLKSRVTISVDTSKNQFSLKLSSVTAADTAVYYCARLPRGDRDAFDIWGQGTMVTVSSGGGGSGGGGSGGGGSDIVMTQSPSSLSASVGDRVTITCRASQGISNYLAWYQQKPGKVPKLLIYAASTLQSGVPSRFSGSGSGTDFTLTISSLQPEDFATYYCQQSYSTPFTFGCGTKVEIKSGGGGSEVQLVESGGGLVQPGGSLKLSCAASGFTFNKYAINWVREAPGKGLEWVARIRSKYNNYATYYADAVKDRFTISRDDSKNTAYLQMNNLKTEDTAVYYCVRNANFGTSYISYFAYWGQGTLVTVSSGGGGSGGGGSGGGGSQTVVTQEPSLTVSPGGTVTLTCGSSTGAVTSGNYPNWVQKKPGQAPRGLIGGTKFLAPGTPARFSGSLLGGKAALTLSGVQPEDEAEYYCVLWYSNRWVFGSGTKLTVL

SEQ ID NO: 267 - protein, 1510 aa, Artificial Sequence
  Synthetic
QVQLVQSGAEVKKPGASVKVSCKASGYTFTNYWMNWVRQAPGQCLEWMGNIHSKAHGTNYNQKFQGRVTMTVDTSSSTAYMELSRLRSDDTAVYYCATRYFYVMDYWGQGTLVTVSSGGGGSGGGGSGGGGSDIQMTQSPSSLSASVGDRVTITCRASQDISNYLNWYQQKPGKVPKLLIYYTSRLHSGVPSRFSGSGSGTDFTLTISSLQPEDVATYYCVQYAQFPLTFGCGTKVEIKSGGGGSEVQLVESGGGLVQPGGSLKLSCAASGFTFNKYAMNWVRQAPGKGMEWVARIRSKYNNYATYYADAVKDRFTISRDDSKNTLYLQMNNLKTEDTAVYYCVRAGNFGSSYISYFAYWGQGTLVTVSSGGGGSGGGGSGGGGSQTVVTQEPSLTVSPGGTVTITCGSSTGAVTSGNYPNWIQKKPGQAPRGLIGGTKFLAPGTPARFSGSLEGGKAALTLSGVQPEDEAEYYCVLYYSNRWVFGSGTKLTVLGGGGSGGGGSGGGGSDKTHTCPPCPAPELLGGPSVFLFPPKPKDTLMISRTPEVTCVVVDVSHEDPEVKFNWYVDGVEVHNAKTKPCEEQYGSTYRCVSVLTVLHQDWLNGKEYKCKVSNKALPAPIEKTISKAKGQPREPQVYTLPPSREEMTKNQVSLTCLVKGFYPSDIAVEWESNGQPENNYKTTPPVLDSDGSFFLYSKLTVDKSRWQQGNVFSCSVMHEALHNHYTQKSLSLSPGKGGGGSGGGGSGGGGSGGGGSGGGGSGGGGSDKTHTCPPCPAPELLGGPSVFLFPPKPKDTLMISRTPEVTCVVVDVSHEDPEVKFNWYVDGVEVHNAKTKPCEEQYGSTYRCVSVLTVLHQDWLNGKEYKCKVSNKALPAPIEKTISKAKGQPREPQVYTLPPSREEMTKNQVSLTCLVKGFYPSDIAVEWESNGQPENNYKTTPPVLDSDGSFFLYSKLTVDKSRWQQGNVFSCSVMHEALHNHYTQKSLSLSPGKGGGGSGGGGSGGGGSQVQLVQSGAEVKKPGASVKVSCKASGYTFTGYYIHWVRQAPGQCLEWMGWINPNSGGTNYAQKFQGRVTMTRDTSISTAYMELSRLRSDDTAVYYCARVEAVAGREYYYFSGMDVWGQGTTVTVSSGGGGSGGGGSGGGGSSYELTQPPSVSVSPGQTASITCSGEKLGDKYVYWYQQKPGQSPVLVIYQSTKRPSGVPERFSGSNSGNTATLTISGTQAMDEADYYCQAYHASTAVFGCGTKLTVLSGGGGSEVQLVESGGGLVQPGGSLKLSCAASGFTFNKYAMNWVRQAPGKGMEWVARIRSKYNNYATYYADAVKDRFTISRDDSKNTLYLQMNNLKTEDTAVYYCVRAGNFGSSYISYFAYWGQGTLVTVSSGGGGSGGGGSGGGGSQTVVTQEPSLTVSPGGTVTITCGSSTGAVTSGNYPNWIQKKPGQAPRGLIGGTKFLAPGTPARFSGSLEGGKAALTLSGVQPEDEAEYYCVLYYSNRWVFGSGTKLTVL

SEQ ID NO: 268 - protein, 1509 aa, Artificial Sequence
  Synthetic
EVQLLESGGGLVQPGGSVRLSCAASGFTFSSYWMYWVRQAPGKCLEWVSKIDPSDDYTNYNQKVKGRFTISIDNSKNTLYLQMNSLRAEDSAVYYCARWDYTHFDVWGQGTTVTVSSGGGGSGGGGSGGGGSEIVMTQSPATLSVSPGERATLSCRASSSVSYMHWYQQKPGQAPRLLIYGTSNLASGVPVRFSGSGSGTEFTLTISRLQSEDVAVYYCQQWSSYPLTFGCGTKVEIKSGGGGSEVQLVESGGGLVQPGGSLKLSCAASGFTFNKYAMNWVRQAPGKCLEWVARIRSKYNNYATYYADSVKDRFTISRDDSKNTAYLQMNNLKTEDTAVYYCVRHGNFGNSYISYWAYWGQGTLVTVSSGGGGSGGGGSGGGGSQTVVTQEPSLTVSPGGTVTLTCGSSTGAVTSGNYPNWVQQKPGQAPRGLIGGTKFLAPGTPARFSGSLLGGKAALTLSGVQPEDEAEYYCVLWYSNRWVFGCGTKLTVLGGGGSGGGGSGGGGSDKTHTCPPCPAPELLGGPSVFLFPPKPKDTLMISRTPEVTCVVVDVSHEDPEVKFNWYVDGVEVHNAKTKPCEEQYGSTYRCVSVLTVLHQDWLNGKEYKCKVSNKALPAPIEKTISKAKGQPREPQVYTLPPSREEMTKNQVSLTCLVKGFYPSDIAVEWESNGQPENNYKTTPPVLDSDGSFFLYSKLTVDKSRWQQGNVFSCSVMHEALHNHYTQKSLSLSPGKGGGGSGGGGSGGGGSGGGGSGGGGSGGGGSDKTHTCPPCPAPELLGGPSVFLFPPKPKDTLMISRTPEVTCVVVDVSHEDPEVKFNWYVDGVEVHNAKTKPCEEQYGSTYRCVSVLTVLHQDWLNGKEYKCKVSNKALPAPIEKTISKAKGQPREPQVYTLPPSREEMTKNQVSLTCLVKGFYPSDIAVEWESNGQPENNYKTTPPVLDSDGSFFLYSKLTVDKSRWQQGNVFSCSVMHEALHNHYTQKSLSLSPGKGGGGSGGGGSGGGGSQVQLVQSGAEVKKPGASVKVSCKASGYTFTGYYIHWVRQAPGQCLEWMGWINPNSGGTNYAQKFQGRVTMTRDTSISTAYMELSRLRSDDTAVYYCARVEAVAGREYYYFSGMDVWGQGTTVTVSSGGGGSGGGGSGGGGSSYELTQPPSVSVSPGQTASITCSGEKLGDKYVYWYQQKPGQSPVLVIYQSTKRPSGVPERFSGSNSGNTATLTISGTQAMDEADYYCQAYHASTAVFGCGTKLTVLSGGGGSEVQLVESGGGLVQPGGSLKLSCAASGFTFNKYAMNWVRQAPGKCLEWVARIRSKYNNYATYYADSVKDRFTISRDDSKNTAYLQMNNLKTEDTAVYYCVRHGNFGNSYISYWAYWGQGTLVTVSSGGGGSGGGGSGGGGSQTVVTQEPSLTVSPGGTVTLTCGSSTGAVTSGNYPNWVQQKPGQAPRGLIGGTKFLAPGTPARFSGSLLGGKAALTLSGVQPEDEAEYYCVLWYSNRWVFGCGTKLTVL

SEQ ID NO: 269 - protein, 1509 aa, Artificial Sequence
  Synthetic
EVQLLESGGGLVQPGGSVRLSCAASGFTFSSYWMYWVRQAPGKCLEWVSKIDPSDDYTNYNQKVKGRFTISIDNSKNTLYLQMNSLRAEDSAVYYCARWDYTHFDVWGQGTTVTVSSGGGGSGGGGSGGGGSEIVMTQSPATLSVSPGERATLSCRASSSVSYMHWYQQKPGQAPRLLIYGTSNLASGVPVRFSGSGSGTEFTLTISRLQSEDVAVYYCQQWSSYPLTFGCGTKVEIKSGGGGSEVQLVESGGGLVQPGGSLKLSCAASGFTFNKYAMNWVRQAPGKGMEWVARIRSKYNNYATYYADAVKDRFTISRDDSKNTLYLQMNNLKTEDTAVYYCVRAGNFGSSYISYFAYWGQGTLVTVSSGGGGSGGGGSGGGGSQTVVTQEPSLTVSPGGTVTITCGSSTGAVTSGNYPNWIQKKPGQAPRGLIGGTKFLAPGTPARFSGSLEGGKAALTLSGVQPEDEAEYYCVLYYSNRWVFGSGTKLTVLGGGGSGGGGSGGGGSDKTHTCPPCPAPELLGGPSVFLFPPKPKDTLMISRTPEVTCVVVDVSHEDPEVKFNWYVDGVEVHNAKTKPCEEQYGSTYRCVSVLTVLHQDWLNGKEYKCKVSNKALPAPIEKTISKAKGQPREPQVYTLPPSREEMTKNQVSLTCLVKGFYPSDIAVEWESNGQPENNYKTTPPVLDSDGSFFLYSKLTVDKSRWQQGNVFSCSVMHEALHNHYTQKSLSLSPGKGGGGSGGGGSGGGGSGGGGSGGGGSGGGGSDKTHTCPPCPAPELLGGPSVFLFPPKPKDTLMISRTPEVTCVVVDVSHEDPEVKFNWYVDGVEVHNAKTKPCEEQYGSTYRCVSVLTVLHQDWLNGKEYKCKVSNKALPAPIEKTISKAKGQPREPQVYTLPPSREEMTKNQVSLTCLVKGFYPSDIAVEWESNGQPENNYKTTPPVLDSDGSFFLYSKLTVDKSRWQQGNVFSCSVMHEALHNHYTQKSLSLSPGKGGGGSGGGGSGGGGSQVQLVQSGAEVKKPGASVKVSCKASGYTFTGYYIHWVRQAPGQCLEWMGWINPNSGGTNYAQKFQGRVTMTRDTSISTAYMELSRLRSDDTAVYYCARVEAVAGREYYYFSGMDVWGQGTTVTVSSGGGGSGGGGSGGGGSSYELTQPPSVSVSPGQTASITCSGEKLGDKYVYWYQQKPGQSPVLVIYQSTKRPSGVPERFSGSNSGNTATLTISGTQAMDEADYYCQAYHASTAVFGCGTKLTVLSGGGGSEVQLVESGGGLVQPGGSLKLSCAASGFTFNKYAMNWVRQAPGKGMEWVARIRSKYNNYATYYADAVKDRFTISRDDSKNTLYLQMNNLKTEDTAVYYCVRAGNFGSSYISYFAYWGQGTLVTVSSGGGGSGGGGSGGGGSQTVVTQEPSLTVSPGGTVTITCGSSTGAVTSGNYPNWIQKKPGQAPRGLIGGTKFLAPGTPARFSGSLEGGKAALTLSGVQPEDEAEYYCVLYYSNRWVFGSGTKLTVL

SEQ ID NO: 270 - protein, 1487 aa, Artificial Sequence
  Synthetic
EVQLLESGGGLVQPGGSVRLSCAASGFTFSSYWMYWVRQAPGKCLEWVSKIDPSDDYTNYNQKVKGRFTISIDNSKNTLYLQMNSLRAEDSAVYYCARWDYTHFDVWGQGTTVTVSSGGGGSGGGGSGGGGSEIVMTQSPATLSVSPGERATLSCRASSSVSYMHWYQQKPGQAPRLLIYGTSNLASGVPVRFSGSGSGTEFTLTISRLQSEDVAVYYCQQWSSYPLTFGCGTKVEIKSGGGGSEVQLVESGGGLVQPGGSLKLSCAASGFTFNKYAMNWVRQAPGKCLEWVARIRSKYNNYATYYADSVKDRFTISRDDSKNTAYLQMNNLKTEDTAVYYCVRHGNFGNSYISYWAYWGQGTLVTVSSGGGGSGGGGSGGGGSQTVVTQEPSLTVSPGGTVTLTCGSSTGAVTSGNYPNWVQQKPGQAPRGLIGGTKFLAPGTPARFSGSLLGGKAALTLSGVQPEDEAEYYCVLWYSNRWVFGCGTKLTVLGGGGDKTHTCPPCPAPELLGGPSVFLFPPKPKDTLMISRTPEVTCVVVDVSHEDPEVKFNWYVDGVEVHNAKTKPCEEQYGSTYRCVSVLTVLHQDWLNGKEYKCKVSNKALPAPIEKTISKAKGQPREPQVYTLPPSREEMTKNQVSLTCLVKGFYPSDIAVEWESNGQPENNYKTTPPVLDSDGSFFLYSKLTVDKSRWQQGNVFSCSVMHEALHNHYTQKSLSLSPGKGGGGSGGGGSGGGGSGGGGSGGGGSGGGGSDKTHTCPPCPAPELLGGPSVFLFPPKPKDTLMISRTPEVTCVVVDVSHEDPEVKFNWYVDGVEVHNAKTKPCEEQYGSTYRCVSVLTVLHQDWLNGKEYKCKVSNKALPAPIEKTISKAKGQPREPQVYTLPPSREEMTKNQVSLTCLVKGFYPSDIAVEWESNGQPENNYKTTPPVLDSDGSFFLYSKLTVDKSRWQQGNVFSCSVMHEALHNHYTQKSLSLSPGKGGGGQVQLVQSGAEVKKPGASVKVSCKASGYTFTGYYIHWVRQAPGQCLEWMGWINPNSGGTNYAQKFQGRVTMTRDTSISTAYMELSRLRSDDTAVYYCARVEAVAGREYYYFSGMDVWGQGTTVTVSSGGGGSGGGGSGGGGSSYELTQPPSVSVSPGQTASITCSGEKLGDKYVYWYQQKPGQSPVLVIYQSTKRPSGVPERFSGSNSGNTATLTISGTQAMDEADYYCQAYHASTAVFGCGTKLTVLSGGGGSEVQLVESGGGLVQPGGSLKLSCAASGFTFNKYAMNWVRQAPGKCLEWVARIRSKYNNYATYYADSVKDRFTISRDDSKNTAYLQMNNLKTEDTAVYYCVRHGNFGNSYISYWAYWGQGTLVTVSSGGGGSGGGGSGGGGSQTVVTQEPSLTVSPGGTVTLTCGSSTGAVTSGNYPNWVQQKPGQAPRGLIGGTKFLAPGTPARFSGSLLGGKAALTLSGVQPEDEAEYYCVLWYSNRWVFGCGTKLTVL

SEQ ID NO: 271 - protein, 1509 aa, Artificial Sequence
  Synthetic
EVQLLESGGGLVQPGGSLRLSCAASGFTFSSYWMHWVRQTPGKCLEWVSKIDPSDDYTNYNQKVKGRFTISIDKSKNTLYLQMNSLRAEDTAVYYCARWDYSHFDVWGQGTTVTVSSGGGGSGGGGSGGGGSEIVMTQSPATLSVSPGERATLTCRASSSVSYMHWYQQKPGQAPRLLIYGTSNLVSGVPARFSGSGSGTEFTLTISSLQSEDFAVYYCQQWSSYPLTFGCGTKVEIKSGGGGSEVQLVESGGGLVQPGGSLKLSCAASGFTFNKYAMNWVRQAPGKCLEWVARIRSKYNNYATYYADSVKDRFTISRDDSKNTAYLQMNNLKTEDTAVYYCVRHGNFGNSYISYWAYWGQGTLVTVSSGGGGSGGGGSGGGGSQTVVTQEPSLTVSPGGTVTLTCGSSTGAVTSGNYPNWVQQKPGQAPRGLIGGTKFLAPGTPARFSGSLLGGKAALTLSGVQPEDEAEYYCVLWYSNRWVFGCGTKLTVLGGGGSGGGGSGGGGSDKTHTCPPCPAPELLGGPSVFLFPPKPKDTLMISRTPEVTCVVVDVSHEDPEVKFNWYVDGVEVHNAKTKPCEEQYGSTYRCVSVLTVLHQDWLNGKEYKCKVSNKALPAPIEKTISKAKGQPREPQVYTLPPSREEMTKNQVSLTCLVKGFYPSDIAVEWESNGQPENNYKTTPPVLDSDGSFFLYSKLTVDKSRWQQGNVFSCSVMHEALHNHYTQKSLSLSPGKGGGGSGGGGSGGGGSGGGGSGGGGSGGGGSDKTHTCPPCPAPELLGGPSVFLFPPKPKDTLMISRTPEVTCVVVDVSHEDPEVKFNWYVDGVEVHNAKTKPCEEQYGSTYRCVSVLTVLHQDWLNGKEYKCKVSNKALPAPIEKTISKAKGQPREPQVYTLPPSREEMTKNQVSLTCLVKGFYPSDIAVEWESNGQPENNYKTTPPVLDSDGSFFLYSKLTVDKSRWQQGNVFSCSVMHEALHNHYTQKSLSLSPGKGGGGSGGGGSGGGGSQVQLVQSGAEVKKPGASVKVSCKASGYTFTGYYIHWVRQAPGQCLEWMGWINPNSGGTNYAQKFQGRVTMTRDTSISTAYMELSRLRSDDTAVYYCARVEAVAGREYYYFSGMDVWGQGTTVTVSSGGGGSGGGGSGGGGSSYELTQPPSVSVSPGQTASITCSGEKLGDKYVYWYQQKPGQSPVLVIYQSTKRPSGVPERFSGSNSGNTATLTISGTQAMDEADYYCQAYHASTAVFGCGTKLTVLSGGGGSEVQLVESGGGLVQPGGSLKLSCAASGFTFNKYAMNWVRQAPGKCLEWVARIRSKYNNYATYYADSVKDRFTISRDDSKNTAYLQMNNLKTEDTAVYYCVRHGNFGNSYISYWAYWGQGTLVTVSSGGGGSGGGGSGGGGSQTVVTQEPSLTVSPGGTVTLTCGSSTGAVTSGNYPNWVQQKPGQAPRGLIGGTKFLAPGTPARFSGSLLGGKAALTLSGVQPEDEAEYYCVLWYSNRWVFGCGTKLTVL

SEQ ID NO: 272 - protein, 1513 aa, Artificial Sequence
  Synthetic
QVQLVESGGGLVKPGGSLRLSCAASGFTFSDYYMTWIRQAPGKCLEWLSYISSSGSTIYYAEAVKGRFTISRDNAKNSLFLQMNSLRAEDTAVYYCARDRNSHFDYWGQGTLVTVSSGGGGSGGGGSGGGGSDIMTQSPSSVSASVGDRVTITCRASQGIRTWLAWYQQKPGKAPKLLIYGASGLQSGVPSRFSGSGSGTDFTLTISSLQPEDFATYYCQQAESFPRTFGCGTKVEIKSGGGGSEVQLVESGGGLVQPGGSLKLSCAASGFTFNKYAMNWVRQAPGKGMEWVARIRSKYNNYATYYADAVKDRFTISRDDSKNTLYLQMNNLKTEDTAVYYCVRAGNFGSSYISYFAYWGQGTLVTVSSGGGGSGGGGSGGGGSQTVVTQEPSLTVSPGGTVTITCGSSTGAVTSGNYPNWIQKKPGQAPRGLIGGTKFLAPGTPARFSGSLEGGKAALTLSGVQPEDEAEYYCVLYYSNRWVFGSGTKLTVLGGGGSGGGGSGGGGSDKTHTCPPCPAPELLGGPSVFLFPPKPKDTLMISRTPEVTCVVVDVSHEDPEVKFNWYVDGVEVHNAKTKPCEEQYGSTYRCVSVLTVLHQDWLNGKEYKCKVSNKALPAPIEKTISKAKGQPREPQVYTLPPSREEMTKNQVSLTCLVKGFYPSDIAVEWESNGQPENNYKTTPPVLDSDGSFFLYSKLTVDKSRWQQGNVFSCSVMHEALHNHYTQKSLSLSPGKGGGGSGGGGSGGGGSGGGGSGGGGSGGGGSDKTHTCPPCPAPELLGGPSVFLFPPKPKDTLMISRTPEVTCVVVDVSHEDPEVKFNWYVDGVEVHNAKTKPCEEQYGSTYRCVSVLTVLHQDWLNGKEYKCKVSNKALPAPIEKTISKAKGQPREPQVYTLPPSREEMTKNQVSLTCLVKGFYPSDIAVEWESNGQPENNYKTTPPVLDSDGSFFLYSKLTVDKSRWQQGNVFSCSVMHEALHNHYTQKSLSLSPGKGGGGSGGGGSGGGGSEVQLLESGGGLVQPGGSLRLSCAASGFSFSSYPINWVRQAPGKCLEWVGVIWTGGGTNYASSVKGRFTISRDNSKNTVYLQMNSLRAEDTAVYYCAKSRGVYDFKGRGAMDYWGQGTLVTVSSGGGGSGGGGSGGGGSDIVMTQSPDSLAVSLGERATINCKSSQSLLYSSNQKNYFAWYQQKPGQPPKLLIYWASTRESGVPDRFSGSGSGTDFTLTISSLQAEDVAVYYCQQYYSYPYTFGCGTKLEIKSGGGGSEVQLVESGGGLVQPGGSLKLSCAASGFTFNKYAMNWVRQAPGKGMEWVARIRSKYNNYATYYADAVKDRFTISRDDSKNTLYLQMNNLKTEDTAVYYCVRAGNFGSSYISYFAYWGQGTLVTVSSGGGGSGGGGSGGGGSQTVVTQEPSLTVSPGGTVTITCGSSTGAVTSGNYPNWIQKKPGQAPRGLIGGTKFLAPGTPARFSGSLEGGKAALTLSGVQPEDEAEYYCVLYYSNRWVFGSGTKLTVL

SEQ ID NO: 273 - protein, 1500 aa, Artificial Sequence
  Synthetic
QVQLQESGPGLVKPSETLSLTCTVSGGSISSSSYFWGWIRQPPGKCLEWIGNIYYSGSSNYNPSLKSRVTISVDTSKNQFSLKLSSVTAADTAVYYCARLPRGDRDAFDIWGQGTMVTVSSGGGGQGGGGQGGGGQDIVMTQSPSSLSASVGDRVTITCRASQGISNYLAWYQQKPGKVPKLLIYAASTLQSGVPSRFSGSGSGTDFTLTISSLQPEDFATYYCQQSYSTPFTFGCGTKVEIKSGGGGQEVQLVESGGGLVQPGGSLKLSCAASGFTFNKYAMNWVRQAPGKGMEWVARIRSKYNNYATYYADAVKDRFTISRDDSKNTLYLQMNNLKTEDTAVYYCVRAGNFGSSYISYFAYWGQGTLVTVSSGGGGQGGGGQGGGGQQTVVTQEPSLTVSPGGTVTITCGSSTGAVTSGNYPNWIQKKPGQAPRGLIGGTKFLAPGTPARFSGSLEGGKAALTLSGVQPEDEAEYYCVLYYSNRWVFGSGTKLTVLGGGGQGGGGQGGGGQCPPCPAPELLGGPSVFLFPPKPKDTLMISRTPEVTCVVVDVSHEEPEVKFNWYVDGVEVHNAKTKPCEEQYGSTYRCVSVLTVLHQDWLNGKEYKCKVSNKALPAPIEKTISKAKGQPREPQVYTLPPSREEMTKNQVSLTCLVKGFYPSDIAVEWESNGQPENNYKTTPPVLDSDGSFFLYSKLTVDKSRWQQGNVFSCSVMHEALHNHYTQKSLSLSPGKGGGGQGGGGQGGGGQGGGGQGGGGQGGGGQCPPCPAPELLGGPSVFLFPPKPKDTLMISRTPEVTCVVVDVSHEEPEVKFNWYVDGVEVHNAKTKPCEEQYGSTYRCVSVLTVLHQDWLNGKEYKCKVSNKALPAPIEKTISKAKGQPREPQVYTLPPSREEMTKNQVSLTCLVKGFYPSDIAVEWESNGQPENNYKTTPPVLDSDGSFFLYSKLTVDKSRWQQGNVFSCSVMHEALHNHYTQKSLSLSPGKGGGGQGGGGQGGGGQQVQLVQSGAEVVKPGASVKVSCKASGYTFTSSWMNWVRQAPGQCLEWMGRIYTGTGETKYSGKFQGRVTITRDTSASTAYMELSSLTSEDTAVYYCARQRDYGALYAMDYWGQGTLVTVSSGGGGQGGGGQGGGGQDIQLTQSPSFLSASVGDRVTITCRASDDIYSYLAWYQQKPGKAPKLLVYNAKTLAEGVPSRFSGSGSGTEFTLTISSLQPEDFATYYCQNHDRTPFTFGCGTKVDIKSGGGGQEVQLVESGGGLVQPGGSLKLSCAASGFTFNKYAMNWVRQAPGKGMEWVARIRSKYNNYATYYADAVKDRFTISRDDSKNTLYLQMNNLKTEDTAVYYCVRAGNFGSSYISYFAYWGQGTLVTVSSGGGGQGGGGQGGGGQQTVVTQEPSLTVSPGGTVTITCGSSTGAVTSGNYPNWIQKKPGQAPRGLIGGTKFLAPGTPARFSGSLEGGKAALTLSGVQPEDEAEYYCVLYYSNRWVFGSGTKLTVL

SEQ ID NO: 274 - protein, 1496 aa, Artificial Sequence
  Synthetic
QVQLQESGPGLVKPSETLSLTCTVSGGSISSSSYFWGWIRQPPGKCLEWIGNIYYSGSSNYNPSLKSRVTISVDTSKNQFSLKLSSVTAADTAVYYCARLPRGDRDAFDIWGQGTMVTVSSGGGGQGGGGQGGGGQDIVMTQSPSSLSASVGDRVTITCRASQGISNYLAWYQQKPGKVPKLLIYAASTLQSGVPSRFSGSGSGTDFTLTISSLQPEDFATYYCQQSYSTPFTFGCGTKVEIKSGGGGQEVQLVESGGGLVQPGGSLKLSCAASGFTFNKYAMNWVRQAPGKGMEWVARIRSKYNNYATYYADAVKDRFTISRDDSKNTLYLQMNNLKTEDTAVYYCVRAGNFGSSYISYFAYWGQGTLVTVSSGGGGQGGGGQGGGGQQTVVTQEPSLTVSPGGTVTITCGSSTGAVTSGNYPNWIQKKPGQAPRGLIGGTKFLAPGTPARFSGSLEGGKAALTLSGVQPEDEAEYYCVLYYSNRWVFGSGTKLTVLGGGGQGGGGQGGGGQCPPCPAPELLGGPSVFLFPPKPKDTLMISRTPEVTCVVVDVSHEEPEVKFNWYVDGVEVHNAKTKPCEEQYGSTYRCVSVLTVLHQDWLNGKEYKCKVSNKALPAPIEKTISKAKGQPREPQVYTLPPSREEMTKNQVSLTCLVKGFYPSDIAVEWESNGQPENNYKTTPPVLDSDGSFFLYSKLTVDKSRWQQGNVFSCSVMHEALHNHYTQKSLSLSPGKGGGGQGGGGQGGGGQGGGGQGGGGQGGGGQCPPCPAPELLGGPSVFLFPPKPKDTLMISRTPEVTCVVVDVSHEEPEVKFNWYVDGVEVHNAKTKPCEEQYGSTYRCVSVLTVLHQDWLNGKEYKCKVSNKALPAPIEKTISKAKGQPREPQVYTLPPSREEMTKNQVSLTCLVKGFYPSDIAVEWESNGQPENNYKTTPPVLDSDGSFFLYSKLTVDKSRWQQGNVFSCSVMHEALHNHYTQKSLSLSPGKGGGGQGGGGQGGGGQQVQLVQSGAEVKKPGASVKVSCKASGYTFTNYWMNWVRQAPGQCLEWMGNIAYGVKGTNYNQKFQGRVTMTVDTSSSTAYMELSRLRSDDTAVYYCATRYFYVMDYWGQGTLVTVSSGGGGQGGGGQGGGGQDIQMTQSPSSLSASVGDRVTITCRASQDISNYLNWYQQKPGKVPKLLIYYTSRLHSGVPSRFSGSGSGTDFTLTISSLQPEDVATYYCVQYAQFPLTFGCGTKVEIKSGGGGQEVQLVESGGGLVQPGGSLKLSCAASGFTFNKYAMNWVRQAPGKGMEWVARIRSKYNNYATYYADAVKDRFTISRDDSKNTLYLQMNNLKTEDTAVYYCVRAGNFGSSYISYFAYWGQGTLVTVSSGGGGQGGGGQGGGGQQTVVTQEPSLTVSPGGTVTITCGSSTGAVTSGNYPNWIQKKPGQAPRGLIGGTKFLAPGTPARFSGSLEGGKAALTLSGVQPEDEAEYYCVLYYSNRWVFGSGTKLTVL

SEQ ID NO: 275 - protein, 1474 aa, Artificial Sequence
  Synthetic
QVQLQESGPGLVKPSETLSLTCTVSGGSISSSSYFWGWIRQPPGKCLEWIGNIYYSGSSNYNPSLKSRVTISVDTSKNQFSLKLSSVTAADTAVYYCARLPRGDRDAFDIWGQGTMVTVSSGGGGQGGGGQGGGGQDIVMTQSPSSLSASVGDRVTITCRASQGISNYLAWYQQKPGKVPKLLIYAASTLQSGVPSRFSGSGSGTDFTLTISSLQPEDFATYYCQQSYSTPFTFGCGTKVEIKSGGGGQEVQLVESGGGLVQPGGSLKLSCAASGFTFNKYAMNWVRQAPGKGMEWVARIRSKYNNYATYYADAVKDRFTISRDDSKNTLYLQMNNLKTEDTAVYYCVRAGNFGSSYISYFAYWGQGTLVTVSSGGGGQGGGGQGGGGQQTVVTQEPSLTVSPGGTVTITCGSSTGAVTSGNYPNWIQKKPGQAPRGLIGGTKFLAPGTPARFSGSLEGGKAALTLSGVQPEDEAEYYCVLYYSNRWVFGSGTKLTVLGGGGCPPCPAPELLGGPSVFLFPPKPKDTLMISRTPEVTCVVVDVSHEEPEVKFNWYVDGVEVHNAKTKPCEEQYGSTYRCVSVLTVLHQDWLNGKEYKCKVSNKALPAPIEKTISKAKGQPREPQVYTLPPSREEMTKNQVSLTCLVKGFYPSDIAVEWESNGQPENNYKTTPPVLDSDGSFFLYSKLTVDKSRWQQGNVFSCSVMHEALHNHYTQKSLSLSPGKGGGGQGGGGQGGGGQGGGGQGGGGQGGGGQCPPCPAPELLGGPSVFLFPPKPKDTLMISRTPEVTCVVVDVSHEEPEVKFNWYVDGVEVHNAKTKPCEEQYGSTYRCVSVLTVLHQDWLNGKEYKCKVSNKALPAPIEKTISKAKGQPREPQVYTLPPSREEMTKNQVSLTCLVKGFYPSDIAVEWESNGQPENNYKTTPPVLDSDGSFFLYSKLTVDKSRWQQGNVFSCSVMHEALHNHYTQKSLSLSPGKGGGGQVQLVQSGAEVKKPGASVKVSCKASGYTFTSYWMHWVRQAPGQCLEWMGVIRTSTSYTIYNQKFKGRVTMTRDTSTSTVYMELSSLRSEDTAVYYCARSGPGYFDVWGQGTMVTVSSGGGGQGGGGQGGGGQDIQLTQSPSFLSASVGDRVTITCRASENIYSYLAWYQQKPGKAPKLLIYNAKTLAEGVPSRFSGSGSGTEFTLTISSLQPEDFATYYCQHNYGTPYTFGCGTKLEIKSGGGGQEVQLVESGGGLVQPGGSLKLSCAASGFTFNKYAMNWVRQAPGKGMEWVARIRSKYNNYATYYADAVKDRFTISRDDSKNTLYLQMNNLKTEDTAVYYCVRAGNFGSSYISYFAYWGQGTLVTVSSGGGGQGGGGQGGGGQQTVVTQEPSLTVSPGGTVTITCGSSTGAVTSGNYPNWIQKKPGQAPRGLIGGTKFLAPGTPARFSGSLEGGKAALTLSGVQPEDEAEYYCVLYYSNRWVFGSGTKLTVL

SEQ ID NO: 276 - protein, 1486 aa, Artificial Sequence
  Synthetic
QVQLQESGPGLVKPSETLSLTCTVSGGSISSSSYFWGWIRQPPGKCLEWIGNIYYSGSSNYNPSLKSRVTISVDTSKNQFSLKLSSVTAADTAVYYCARLPRGDRDAFDIWGQGTMVTVSSGGGGQGGGGQGGGGQDIVMTQSPSSLSASVGDRVTITCRASQGISNYLAWYQQKPGKVPKLLIYAASTLQSGVPSRFSGSGSGTDFTLTISSLQPEDFATYYCQQSYSTPFTFGCGTKVEIKSGGGGQEVQLVESGGGLVQPGGSLKLSCAASGFTFNKYAMNWVRQAPGKGMEWVARIRSKYNNYATYYADAVKDRFTISRDDSKNTLYLQMNNLKTEDTAVYYCVRAGNFGSSYISYFAYWGQGTLVTVSSGGGGQGGGGQGGGGQQTVVTQEPSLTVSPGGTVTITCGSSTGAVTSGNYPNWIQKKPGQAPRGLIGGTKFLAPGTPARFSGSLEGGKAALTLSGVQPEDEAEYYCVLYYSNRWVFGSGTKLTVLGGGGCPPCPAPELLGGPSVFLFPPKPKDTLMISRTPEVTCVVVDVSHEEPEVKFNWYVDGVEVHNAKTKPCEEQYGSTYRCVSVLTVLHQDWLNGKEYKCKVSNKALPAPIEKTISKAKGQPREPQVYTLPPSREEMTKNQVSLTCLVKGFYPSDIAVEWESNGQPENNYKTTPPVLDSDGSFFLYSKLTVDKSRWQQGNVFSCSVMHEALHNHYTQKSLSLSPGKGGGGQGGGGQGGGGQGGGGQGGGGQGGGGQCPPCPAPELLGGPSVFLFPPKPKDTLMISRTPEVTCVVVDVSHEEPEVKFNWYVDGVEVHNAKTKPCEEQYGSTYRCVSVLTVLHQDWLNGKEYKCKVSNKALPAPIEKTISKAKGQPREPQVYTLPPSREEMTKNQVSLTCLVKGFYPSDIAVEWESNGQPENNYKTTPPVLDSDGSFFLYSKLTVDKSRWQQGNVFSCSVMHEALHNHYTQKSLSLSPGKGGGGEVQLLESGGGLVQPGGSLRLSCAASGFSFSSYPINWVRQAPGKCLEWVGVIWTGGGTNYASSVKGRFTISRDNSKNTVYLQMNSLRAEDTAVYYCAKSRGVYDFKGRGAMDYWGQGTLVTVSSGGGGQGGGGQGGGGQDIVMTQSPDSLAVSLGERATINCKSSQSLLYSSNQKNYFAWYQQKPGQPPKLLIYWASTRESGVPDRFSGSGSGTDFTLTISSLQAEDVAVYYCQQYYSYPYTFGCGTKLEIKSGGGGQEVQLVESGGGLVQPGGSLKLSCAASGFTFNKYAMNWVRQAPGKGMEWVARIRSKYNNYATYYADAVKDRFTISRDDSKNTLYLQMNNLKTEDTAVYYCVRAGNFGSSYISYFAYWGQGTLVTVSSGGGGQGGGGQGGGGQQTVVTQEPSLTVSPGGTVTITCGSSTGAVTSGNYPNWIQKKPGQAPRGLIGGTKFLAPGTPARFSGSLEGGKAALTLSGVQPEDEAEYYCVLYYSNRWVFGSGTKLTVL

SEQ ID NO: 277 - protein, 1474 aa, Artificial Sequence
  Synthetic
QVQLQESGPGLVKPSETLSLTCTVSGGSISSSSYFWGWIRQPPGKCLEWIGNIYYSGSSNYNPSLKSRVTISVDTSKNQFSLKLSSVTAADTAVYYCARLPRGDRDAFDIWGQGTMVTVSSGGGGQGGGGQGGGGQDIVMTQSPSSLSASVGDRVTITCRASQGISNYLAWYQQKPGKVPKLLIYAASTLQSGVPSRFSGSGSGTDFTLTISSLQPEDFATYYCQQSYSTPFTFGCGTKVEIKSGGGGQEVQLVESGGGLVQPGGSLKLSCAASGFTFNKYAMNWVRQAPGKGMEWVARIRSKYNNYATYYADAVKDRFTISRDDSKNTLYLQMNNLKTEDTAVYYCVRAGNFGSSYISYFAYWGQGTLVTVSSGGGGQGGGGQGGGGQQTVVTQEPSLTVSPGGTVTITCGSSTGAVTSGNYPNWIQKKPGQAPRGLIGGTKFLAPGTPARFSGSLEGGKAALTLSGVQPEDEAEYYCVLYYSNRWVFGSGTKLTVLGGGGCPPCPAPELLGGPSVFLFPPKPKDTLMISRTPEVTCVVVDVSHEEPEVKFNWYVDGVEVHNAKTKPCEEQYGSTYRCVSVLTVLHQDWLNGKEYKCKVSNKALPAPIEKTISKAKGQPREPQVYTLPPSREEMTKNQVSLTCLVKGFYPSDIAVEWESNGQPENNYKTTPPVLDSDGSFFLYSKLTVDKSRWQQGNVFSCSVMHEALHNHYTQKSLSLSPGKGGGGQGGGGQGGGGQGGGGQGGGGQGGGGQCPPCPAPELLGGPSVFLFPPKPKDTLMISRTPEVTCVVVDVSHEEPEVKFNWYVDGVEVHNAKTKPCEEQYGSTYRCVSVLTVLHQDWLNGKEYKCKVSNKALPAPIEKTISKAKGQPREPQVYTLPPSREEMTKNQVSLTCLVKGFYPSDIAVEWESNGQPENNYKTTPPVLDSDGSFFLYSKLTVDKSRWQQGNVFSCSVMHEALHNHYTQKSLSLSPGKGGGGQVQLVQSGAEVKKPGASVKVSCKASGYTFTNYWMNWVRQAPGQCLEWMGNIAYGVKGTNYNQKFQGRVTMTVDTSSSTAYMELSRLRSDDTAVYYCATRYFYVMDYWGQGTLVTVSSGGGGQGGGGQGGGGQDIQMTQSPSSLSASVGDRVTITCRASQDISNYLNWYQQKPGKVPKLLIYYTSRLHSGVPSRFSGSGSGTDFTLTISSLQPEDVATYYCVQYAQFPLTFGCGTKVEIKSGGGGQEVQLVESGGGLVQPGGSLKLSCAASGFTFNKYAMNWVRQAPGKGMEWVARIRSKYNNYATYYADAVKDRFTISRDDSKNTLYLQMNNLKTEDTAVYYCVRAGNFGSSYISYFAYWGQGTLVTVSSGGGGQGGGGQGGGGQQTVVTQEPSLTVSPGGTVTITCGSSTGAVTSGNYPNWIQKKPGQAPRGLIGGTKFLAPGTPARFSGSLEGGKAALTLSGVQPEDEAEYYCVLYYSNRWVFGSGTKLTVL

SEQ ID NO: 278 - protein, 1506 aa, Artificial Sequence
  Synthetic
QVQLQESGPGLVKPSETLSLTCTVSGGSISSSSYFWGWIRQPPGKCLEWIGNIYYSGSSNYNPSLKSRVTISVDTSKNQFSLKLSSVTAADTAVYYCARLPRGDRDAFDIWGQGTMVTVSSGGGGSGGGGSGGGGSDIVMTQSPSSLSASVGDRVTITCRASQGISNYLAWYQQKPGKVPKLLIYAASTLQSGVPSRFSGSGSGTDFTLTISSLQPEDFATYYCQQSYSTPFTFGCGTKVEIKSGGGGSEVQLVESGGGLVQPGGSLKLSCAASGFTFNKYAMNWVRQAPGKGMEWVARIRSKYNNYATYYADAVKDRFTISRDDSKNTLYLQMNNLKTEDTAVYYCVRAGNFGSSYISYFAYWGQGTLVTVSSGGGGSGGGGSGGGGSQTVVTQEPSLTVSPGGTVTITCGSSTGAVTSGNYPNWIQKKPGQAPRGLIGGTKFLAPGTPARFSGSLEGGKAALTLSGVQPEDEAEYYCVLYYSNRWVFGSGTKLTVLGGGGSGGGGSGGGGSDKTHTCPPCPAPELLGGPSVFLFPPKPKDTLMISRTPEVTCVVVDVSHEDPEVKFNWYVDGVEVHNAKTKPCEEQYGSTYRCVSVLTVLHQDWLNGKEYKCKVSNKALPAPIEKTISKAKGQPREPQVYTLPPSREEMTKNQVSLTCLVKGFYPSDIAVEWESNGQPENNYKTTPPVLDSDGSFFLYSKLTVDKSRWQQGNVFSCSVMHEALHNHYTQKSLSLSPGKGGGGSGGGGSGGGGSGGGGSGGGGSGGGGSDKTHTCPPCPAPELLGGPSVFLFPPKPKDTLMISRTPEVTCVVVDVSHEDPEVKFNWYVDGVEVHNAKTKPCEEQYGSTYRCVSVLTVLHQDWLNGKEYKCKVSNKALPAPIEKTISKAKGQPREPQVYTLPPSREEMTKNQVSLTCLVKGFYPSDIAVEWESNGQPENNYKTTPPVLDSDGSFFLYSKLTVDKSRWQQGNVFSCSVMHEALHNHYTQKSLSLSPGKGGGGSGGGGSGGGGSQVQLVQSGAEVKKPGASVKVSCKASGYTFTSYWMHWVRQAPGQCLEWMGVIRTSTSYTIYNQKFKGRVTMTRDTSTSTVYMELSSLRSEDTAVYYCARSGPGYFDVWGQGTMVTVSSGGGGSGGGGSGGGGSDIQLTQSPSFLSASVGDRVTITCRASENIYSYLAWYQQKPGKAPKLLIYNAKTLAEGVPSRFSGSGSGTEFTLTISSLQPEDFATYYCQHNYGTPYTFGCGTKLEIKSGGGGSEVQLVESGGGLVQPGGSLKLSCAASGFTFNKYAMNWVRQAPGKGMEWVARIRSKYNNYATYYADAVKDRFTISRDDSKNTLYLQMNNLKTEDTAVYYCVRAGNFGSSYISYFAYWGQGTLVTVSSGGGGSGGGGSGGGGSQTVVTQEPSLTVSPGGTVTITCGSSTGAVTSGNYPNWIQKKPGQAPRGLIGGTKFLAPGTPARFSGSLEGGKAALTLSGVQPEDEAEYYCVLYYSNRWVFGSGTKLTVL

SEQ ID NO: 279 - protein, 1506 aa, Artificial Sequence
  Synthetic
QVQLQESGPGLVKPSETLSLTCTVSGGSISSSSYFWGWIRQPPGKCLEWIGNIYYSGSSNYNPSLKSRVTISVDTSKNQFSLKLSSVTAADTAVYYCARLPRGDRDAFDIWGQGTMVTVSSGGGGSGGGGSGGGGSDIVMTQSPSSLSASVGDRVTITCRASQGISNYLAWYQQKPGKVPKLLIYAASTLQSGVPSRFSGSGSGTDFTLTISSLQPEDFATYYCQQSYSTPFTFGCGTKVEIKSGGGGSEVQLVESGGGLVQPGGSLKLSCAASGFTFNKYAMNWVRQAPGKGMEWVARIRSKYNNYATYYADAVKDRFTISRDDSKNTLYLQMNNLKTEDTAVYYCVRAGNFGSSYISYFAYWGQGTLVTVSSGGGGSGGGGSGGGGSQTVVTQEPSLTVSPGGTVTITCGSSTGAVTSGNYPNWIQKKPGQAPRGLIGGTKFLAPGTPARFSGSLEGGKAALTLSGVQPEDEAEYYCVLYYSNRWVFGSGTKLTVLGGGGSGGGGSGGGGSDKTHTCPPCPAPELLGGPSVFLFPPKPKDTLMISRTPEVTCVVVDVSHEDPEVKFNWYVDGVEVHNAKTKPCEEQYGSTYRCVSVLTVLHQDWLNGKEYKCKVSNKALPAPIEKTISKAKGQPREPQVYTLPPSREEMTKNQVSLTCLVKGFYPSDIAVEWESNGQPENNYKTTPPVLDSDGSFFLYSKLTVDKSRWQQGNVFSCSVMHEALHNHYTQKSLSLSPGKGGGGSGGGGSGGGGSGGGGSGGGGSGGGGSDKTHTCPPCPAPELLGGPSVFLFPPKPKDTLMISRTPEVTCVVVDVSHEDPEVKFNWYVDGVEVHNAKTKPCEEQYGSTYRCVSVLTVLHQDWLNGKEYKCKVSNKALPAPIEKTISKAKGQPREPQVYTLPPSREEMTKNQVSLTCLVKGFYPSDIAVEWESNGQPENNYKTTPPVLDSDGSFFLYSKLTVDKSRWQQGNVFSCSVMHEALHNHYTQKSLSLSPGKGGGGSGGGGSGGGGSQVQLVQSGAEVKKPGASVKVSCKASGYTFTNYWMNWVRQAPGQCLEWMGNIHSKAHGTNYNQKFQGRVTMTVDTSSSTAYMELSRLRSDDTAVYYCATRYFYVMDYWGQGTLVTVSSGGGGSGGGGSGGGGSDIQMTQSPSSLSASVGDRVTITCRASQDISNYLNWYQQKPGKVPKLLIYYTSRLHSGVPSRFSGSGSGTDFTLTISSLQPEDVATYYCVQYAQFPLTFGCGTKVEIKSGGGGSEVQLVESGGGLVQPGGSLKLSCAASGFTFNKYAMNWVRQAPGKGMEWVARIRSKYNNYATYYADAVKDRFTISRDDSKNTLYLQMNNLKTEDTAVYYCVRAGNFGSSYISYFAYWGQGTLVTVSSGGGGSGGGGSGGGGSQTVVTQEPSLTVSPGGTVTITCGSSTGAVTSGNYPNWIQKKPGQAPRGLIGGTKFLAPGTPARFSGSLEGGKAALTLSGVQPEDEAEYYCVLYYSNRWVFGSGTKLTVL

SEQ ID NO: 280 - protein, 1484 aa, Artificial Sequence
  Synthetic
QVQLQESGPGLVKPSETLSLTCTVSGGSISSSSYFWGWIRQPPGKCLEWIGNIYYSGSSNYNPSLKSRVTISVDTSKNQFSLKLSSVTAADTAVYYCARLPRGDRDAFDIWGQGTMVTVSSGGGGSGGGGSGGGGSDIVMTQSPSSLSASVGDRVTITCRASQGISNYLAWYQQKPGKVPKLLIYAASTLQSGVPSRFSGSGSGTDFTLTISSLQPEDFATYYCQQSYSTPFTFGCGTKVEIKSGGGGSEVQLVESGGGLVQPGGSLKLSCAASGFTFNKYAINWVREAPGKGLEWVARIRSKYNNYATYYADAVKDRFTISRDDSKNTAYLQMNNLKTEDTAVYYCVRNANFGTSYISYFAYWGQGTLVTVSSGGGGSGGGGSGGGGSQTVVTQEPSLTVSPGGTVTLTCGSSTGAVTSGNYPNWVQKKPGQAPRGLIGGTKFLAPGTPARFSGSLLGGKAALTLSGVQPEDEAEYYCVLWYSNRWVFGSGTKLTVLGGGGDKTHTCPPCPAPELLGGPSVFLFPPKPKDTLMISRTPEVTCVVVDVSHEDPEVKFNWYVDGVEVHNAKTKPCEEQYGSTYRCVSVLTVLHQDWLNGKEYKCKVSNKALPAPIEKTISKAKGQPREPQVYTLPPSREEMTKNQVSLTCLVKGFYPSDIAVEWESNGQPENNYKTTPPVLDSDGSFFLYSKLTVDKSRWQQGNVFSCSVMHEALHNHYTQKSLSLSPGKGGGGSGGGGSGGGGSGGGGSGGGGSGGGGSDKTHTCPPCPAPELLGGPSVFLFPPKPKDTLMISRTPEVTCVVVDVSHEDPEVKFNWYVDGVEVHNAKTKPCEEQYGSTYRCVSVLTVLHQDWLNGKEYKCKVSNKALPAPIEKTISKAKGQPREPQVYTLPPSREEMTKNQVSLTCLVKGFYPSDIAVEWESNGQPENNYKTTPPVLDSDGSFFLYSKLTVDKSRWQQGNVFSCSVMHEALHNHYTQKSLSLSPGKGGGGQVQLVQSGAEVKKPGASVKVSCKASGYTFTNYWMNWVRQAPGQCLEWMGNIAYGVKGTNYNQKFQGRVTMTVDTSSSTAYMELSRLRSDDTAVYYCATRYFYVMDYWGQGTLVTVSSGGGGSGGGGSGGGGSDIQMTQSPSSLSASVGDRVTITCRASQDISNYLNWYQQKPGKVPKLLIYYTSRLHSGVPSRFSGSGSGTDFTLTISSLQPEDVATYYCVQYAQFPLTFGCGTKVEIKSGGGGSEVQLVESGGGLVQPGGSLKLSCAASGFTFNKYAINWVREAPGKGLEWVARIRSKYNNYATYYADAVKDRFTISRDDSKNTAYLQMNNLKTEDTAVYYCVRNANFGTSYISYFAYWGQGTLVTVSSGGGGSGGGGSGGGGSQTVVTQEPSLTVSPGGTVTLTCGSSTGAVTSGNYPNWVQKKPGQAPRGLIGGTKFLAPGTPARFSGSLLGGKAALTLSGVQPEDEAEYYCVLWYSNRWVFGSGTKLTVL

SEQ ID NO: 281 - protein, 1500 aa, Artificial Sequence
  Synthetic
QVQLQESGPGLVKPSETLSLTCTVSGGSISSSSYFWGWIRQPPGKCLEWIGNIYYSGSSNYNPSLKSRVTISVDTSKNQFSLKLSSVTAADTAVYYCARLPRGDRDAFDIWGQGTMVTVSSGGGGQGGGGQGGGGQDIVMTQSPSSLSASVGDRVTITCRASQGISNYLAWYQQKPGKVPKLLIYAASTLQSGVPSRFSGSGSGTDFTLTISSLQPEDFATYYCQQSYSTPFTFGCGTKVEIKSGGGGQEVQLVESGGGLVQPGGSLKLSCAASGFTFNKYAINWVREAPGKGLEWVARIRSKYNNYATYYADAVKDRFTISRDDSKNTAYLQMNNLKTEDTAVYYCVRNANFGTSYISYFAYWGQGTLVTVSSGGGGQGGGGQGGGGQQTVVTQEPSLTVSPGGTVTLTCGSSTGAVTSGNYPNWVQKKPGQAPRGLIGGTKFLAPGTPARFSGSLLGGKAALTLSGVQPEDEAEYYCVLWYSNRWVFGSGTKLTVLGGGGQGGGGQGGGGQCPPCPAPELLGGPSVFLFPPKPKDTLMISRTPEVTCVVVDVSHEEPEVKFNWYVDGVEVHNAKTKPCEEQYGSTYRCVSVLTVLHQDWLNGKEYKCKVSNKALPAPIEKTISKAKGQPREPQVYTLPPSREEMTKNQVSLTCLVKGFYPSDIAVEWESNGQPENNYKTTPPVLDSDGSFFLYSKLTVDKSRWQQGNVFSCSVMHEALHNHYTQKSLSLSPGKGGGGQGGGGQGGGGQGGGGQGGGGQGGGGQCPPCPAPELLGGPSVFLFPPKPKDTLMISRTPEVTCVVVDVSHEEPEVKFNWYVDGVEVHNAKTKPCEEQYGSTYRCVSVLTVLHQDWLNGKEYKCKVSNKALPAPIEKTISKAKGQPREPQVYTLPPSREEMTKNQVSLTCLVKGFYPSDIAVEWESNGQPENNYKTTPPVLDSDGSFFLYSKLTVDKSRWQQGNVFSCSVMHEALHNHYTQKSLSLSPGKGGGGQGGGGQGGGGQQVQLVQSGAEVVKPGASVKVSCKASGYTFTSSWMNWVRQAPGQCLEWMGRIYTGTGETKYSGKFQGRVTITRDTSASTAYMELSSLTSEDTAVYYCARQRDYGALYAMDYWGQGTLVTVSSGGGGQGGGGQGGGGQDIQLTQSPSFLSASVGDRVTITCRASDDIYSYLAWYQQKPGKAPKLLVYNAKTLAEGVPSRFSGSGSGTEFTLTISSLQPEDFATYYCQNHDRTPFTFGCGTKVDIKSGGGGQEVQLVESGGGLVQPGGSLKLSCAASGFTFNKYAINWVREAPGKGLEWVARIRSKYNNYATYYADAVKDRFTISRDDSKNTAYLQMNNLKTEDTAVYYCVRNANFGTSYISYFAYWGQGTLVTVSSGGGGQGGGGQGGGGQQTVVTQEPSLTVSPGGTVTLTCGSSTGAVTSGNYPNWVQKKPGQAPRGLIGGTKFLAPGTPARFSGSLLGGKAALTLSGVQPEDEAEYYCVLWYSNRWVFGSGTKLTVL

SEQ ID NO: 282 - protein, 1496 aa, Artificial Sequence
  Synthetic
QVQLQESGPGLVKPSETLSLTCTVSGGSISSSSYFWGWIRQPPGKCLEWIGNIYYSGSSNYNPSLKSRVTISVDTSKNQFSLKLSSVTAADTAVYYCARLPRGDRDAFDIWGQGTMVTVSSGGGGQGGGGQGGGGQDIVMTQSPSSLSASVGDRVTITCRASQGISNYLAWYQQKPGKVPKLLIYAASTLQSGVPSRFSGSGSGTDFTLTISSLQPEDFATYYCQQSYSTPFTFGCGTKVEIKSGGGGQEVQLVESGGGLVQPGGSLKLSCAASGFTFNKYAINWVREAPGKGLEWVARIRSKYNNYATYYADAVKDRFTISRDDSKNTAYLQMNNLKTEDTAVYYCVRNANFGTSYISYFAYWGQGTLVTVSSGGGGQGGGGQGGGGQQTVVTQEPSLTVSPGGTVTLTCGSSTGAVTSGNYPNWVQKKPGQAPRGLIGGTKFLAPGTPARFSGSLLGGKAALTLSGVQPEDEAEYYCVLWYSNRWVFGSGTKLTVLGGGGQGGGGQGGGGQCPPCPAPELLGGPSVFLFPPKPKDTLMISRTPEVTCVVVDVSHEEPEVKFNWYVDGVEVHNAKTKPCEEQYGSTYRCVSVLTVLHQDWLNGKEYKCKVSNKALPAPIEKTISKAKGQPREPQVYTLPPSREEMTKNQVSLTCLVKGFYPSDIAVEWESNGQPENNYKTTPPVLDSDGSFFLYSKLTVDKSRWQQGNVFSCSVMHEALHNHYTQKSLSLSPGKGGGGQGGGGQGGGGQGGGGQGGGGQGGGGQCPPCPAPELLGGPSVFLFPPKPKDTLMISRTPEVTCVVVDVSHEEPEVKFNWYVDGVEVHNAKTKPCEEQYGSTYRCVSVLTVLHQDWLNGKEYKCKVSNKALPAPIEKTISKAKGQPREPQVYTLPPSREEMTKNQVSLTCLVKGFYPSDIAVEWESNGQPENNYKTTPPVLDSDGSFFLYSKLTVDKSRWQQGNVFSCSVMHEALHNHYTQKSLSLSPGKGGGGQGGGGQGGGGQQVQLVQSGAEVKKPGASVKVSCKASGYTFTNYWMNWVRQAPGQCLEWMGNIAYGVKGTNYNQKFQGRVTMTVDTSSSTAYMELSRLRSDDTAVYYCATRYFYVMDYWGQGTLVTVSSGGGGQGGGGQGGGGQDIQMTQSPSSLSASVGDRVTITCRASQDISNYLNWYQQKPGKVPKLLIYYTSRLHSGVPSRFSGSGSGTDFTLTISSLQPEDVATYYCVQYAQFPLTFGCGTKVEIKSGGGGQEVQLVESGGGLVQPGGSLKLSCAASGFTFNKYAINWVREAPGKGLEWVARIRSKYNNYATYYADAVKDRFTISRDDSKNTAYLQMNNLKTEDTAVYYCVRNANFGTSYISYFAYWGQGTLVTVSSGGGGQGGGGQGGGGQQTVVTQEPSLTVSPGGTVTLTCGSSTGAVTSGNYPNWVQKKPGQAPRGLIGGTKFLAPGTPARFSGSLLGGKAALTLSGVQPEDEAEYYCVLWYSNRWVFGSGTKLTVL

SEQ ID NO: 283 - protein, 1486 aa, Artificial Sequence
  Synthetic
QVQLQESGPGLVKPSETLSLTCTVSGGSISSSSYFWGWIRQPPGKCLEWIGNIYYSGSSNYNPSLKSRVTISVDTSKNQFSLKLSSVTAADTAVYYCARLPRGDRDAFDIWGQGTMVTVSSGGGGQGGGGQGGGGQDIVMTQSPSSLSASVGDRVTITCRASQGISNYLAWYQQKPGKVPKLLIYAASTLQSGVPSRFSGSGSGTDFTLTISSLQPEDFATYYCQQSYSTPFTFGCGTKVEIKSGGGGQEVQLVESGGGLVQPGGSLKLSCAASGFTFNKYAINWVREAPGKGLEWVARIRSKYNNYATYYADAVKDRFTISRDDSKNTAYLQMNNLKTEDTAVYYCVRNANFGTSYISYFAYWGQGTLVTVSSGGGGQGGGGQGGGGQQTVVTQEPSLTVSPGGTVTLTCGSSTGAVTSGNYPNWVQKKPGQAPRGLIGGTKFLAPGTPARFSGSLLGGKAALTLSGVQPEDEAEYYCVLWYSNRWVFGSGTKLTVLGGGGCPPCPAPELLGGPSVFLFPPKPKDTLMISRTPEVTCVVVDVSHEEPEVKFNWYVDGVEVHNAKTKPCEEQYGSTYRCVSVLTVLHQDWLNGKEYKCKVSNKALPAPIEKTISKAKGQPREPQVYTLPPSREEMTKNQVSLTCLVKGFYPSDIAVEWESNGQPENNYKTTPPVLDSDGSFFLYSKLTVDKSRWQQGNVFSCSVMHEALHNHYTQKSLSLSPGKGGGGQGGGGQGGGGQGGGGQGGGGQGGGGQCPPCPAPELLGGPSVFLFPPKPKDTLMISRTPEVTCVVVDVSHEEPEVKFNWYVDGVEVHNAKTKPCEEQYGSTYRCVSVLTVLHQDWLNGKEYKCKVSNKALPAPIEKTISKAKGQPREPQVYTLPPSREEMTKNQVSLTCLVKGFYPSDIAVEWESNGQPENNYKTTPPVLDSDGSFFLYSKLTVDKSRWQQGNVFSCSVMHEALHNHYTQKSLSLSPGKGGGGEVQLLESGGGLVQPGGSLRLSCAASGFSFSSYPINWVRQAPGKCLEWVGVIWTGGGTNYASSVKGRFTISRDNSKNTVYLQMNSLRAEDTAVYYCAKSRGVYDFKGRGAMDYWGQGTLVTVSSGGGGQGGGGQGGGGQDIVMTQSPDSLAVSLGERATINCKSSQSLLYSSNQKNYFAWYQQKPGQPPKLLIYWASTRESGVPDRFSGSGSGTDFTLTISSLQAEDVAVYYCQQYYSYPYTFGCGTKLEIKSGGGGQEVQLVESGGGLVQPGGSLKLSCAASGFTFNKYAINWVREAPGKGLEWVARIRSKYNNYATYYADAVKDRFTISRDDSKNTAYLQMNNLKTEDTAVYYCVRNANFGTSYISYFAYWGQGTLVTVSSGGGGQGGGGQGGGGQQTVVTQEPSLTVSPGGTVTLTCGSSTGAVTSGNYPNWVQKKPGQAPRGLIGGTKFLAPGTPARFSGSLLGGKAALTLSGVQPEDEAEYYCVLWYSNRWVFGSGTKLTVL

SEQ ID NO: 284 - protein, 1478 aa, Artificial Sequence
  Synthetic
QVQLQESGPGLVKPSETLSLTCTVSGGSISSSSYFWGWIRQPPGKCLEWIGNIYYSGSSNYNPSLKSRVTISVDTSKNQFSLKLSSVTAADTAVYYCARLPRGDRDAFDIWGQGTMVTVSSGGGGQGGGGQGGGGQDIVMTQSPSSLSASVGDRVTITCRASQGISNYLAWYQQKPGKVPKLLIYAASTLQSGVPSRFSGSGSGTDFTLTISSLQPEDFATYYCQQSYSTPFTFGCGTKVEIKSGGGGQEVQLVESGGGLVQPGGSLKLSCAASGFTFNKYAINWVREAPGKGLEWVARIRSKYNNYATYYADAVKDRFTISRDDSKNTAYLQMNNLKTEDTAVYYCVRNANFGTSYISYFAYWGQGTLVTVSSGGGGQGGGGQGGGGQQTVVTQEPSLTVSPGGTVTLTCGSSTGAVTSGNYPNWVQKKPGQAPRGLIGGTKFLAPGTPARFSGSLLGGKAALTLSGVQPEDEAEYYCVLWYSNRWVFGSGTKLTVLGGGGCPPCPAPELLGGPSVFLFPPKPKDTLMISRTPEVTCVVVDVSHEEPEVKFNWYVDGVEVHNAKTKPCEEQYGSTYRCVSVLTVLHQDWLNGKEYKCKVSNKALPAPIEKTISKAKGQPREPQVYTLPPSREEMTKNQVSLTCLVKGFYPSDIAVEWESNGQPENNYKTTPPVLDSDGSFFLYSKLTVDKSRWQQGNVFSCSVMHEALHNHYTQKSLSLSPGKGGGGQGGGGQGGGGQGGGGQGGGGQGGGGQCPPCPAPELLGGPSVFLFPPKPKDTLMISRTPEVTCVVVDVSHEEPEVKFNWYVDGVEVHNAKTKPCEEQYGSTYRCVSVLTVLHQDWLNGKEYKCKVSNKALPAPIEKTISKAKGQPREPQVYTLPPSREEMTKNQVSLTCLVKGFYPSDIAVEWESNGQPENNYKTTPPVLDSDGSFFLYSKLTVDKSRWQQGNVFSCSVMHEALHNHYTQKSLSLSPGKGGGGQVQLVQSGAEVVKPGASVKVSCKASGYTFTSSWMNWVRQAPGQCLEWMGRIYTGTGETKYSGKFQGRVTITRDTSASTAYMELSSLTSEDTAVYYCARQRDYGALYAMDYWGQGTLVTVSSGGGGQGGGGQGGGGQDIQLTQSPSFLSASVGDRVTITCRASDDIYSYLAWYQQKPGKAPKLLVYNAKTLAEGVPSRFSGSGSGTEFTLTISSLQPEDFATYYCQNHDRTPFTFGCGTKVDIKSGGGGQEVQLVESGGGLVQPGGSLKLSCAASGFTFNKYAINWVREAPGKGLEWVARIRSKYNNYATYYADAVKDRFTISRDDSKNTAYLQMNNLKTEDTAVYYCVRNANFGTSYISYFAYWGQGTLVTVSSGGGGQGGGGQGGGGQQTVVTQEPSLTVSPGGTVTLTCGSSTGAVTSGNYPNWVQKKPGQAPRGLIGGTKFLAPGTPARFSGSLLGGKAALTLSGVQPEDEAEYYCVLWYSNRWVFGSGTKLTVL

SEQ ID NO: 285 - protein, 1474 aa, Artificial Sequence
  Synthetic
QVQLQESGPGLVKPSETLSLTCTVSGGSISSSSYFWGWIRQPPGKCLEWIGNIYYSGSSNYNPSLKSRVTISVDTSKNQFSLKLSSVTAADTAVYYCARLPRGDRDAFDIWGQGTMVTVSSGGGGQGGGGQGGGGQDIVMTQSPSSLSASVGDRVTITCRASQGISNYLAWYQQKPGKVPKLLIYAASTLQSGVPSRFSGSGSGTDFTLTISSLQPEDFATYYCQQSYSTPFTFGCGTKVEIKSGGGGQEVQLVESGGGLVQPGGSLKLSCAASGFTFNKYAINWVREAPGKGLEWVARIRSKYNNYATYYADAVKDRFTISRDDSKNTAYLQMNNLKTEDTAVYYCVRNANFGTSYISYFAYWGQGTLVTVSSGGGGQGGGGQGGGGQQTVVTQEPSLTVSPGGTVTLTCGSSTGAVTSGNYPNWVQKKPGQAPRGLIGGTKFLAPGTPARFSGSLLGGKAALTLSGVQPEDEAEYYCVLWYSNRWVFGSGTKLTVLGGGGCPPCPAPELLGGPSVFLFPPKPKDTLMISRTPEVTCVVVDVSHEEPEVKFNWYVDGVEVHNAKTKPCEEQYGSTYRCVSVLTVLHQDWLNGKEYKCKVSNKALPAPIEKTISKAKGQPREPQVYTLPPSREEMTKNQVSLTCLVKGFYPSDIAVEWESNGQPENNYKTTPPVLDSDGSFFLYSKLTVDKSRWQQGNVFSCSVMHEALHNHYTQKSLSLSPGKGGGGQGGGGQGGGGQGGGGQGGGGQGGGGQCPPCPAPELLGGPSVFLFPPKPKDTLMISRTPEVTCVVVDVSHEEPEVKFNWYVDGVEVHNAKTKPCEEQYGSTYRCVSVLTVLHQDWLNGKEYKCKVSNKALPAPIEKTISKAKGQPREPQVYTLPPSREEMTKNQVSLTCLVKGFYPSDIAVEWESNGQPENNYKTTPPVLDSDGSFFLYSKLTVDKSRWQQGNVFSCSVMHEALHNHYTQKSLSLSPGKGGGGQVQLVQSGAEVKKPGASVKVSCKASGYTFTSYWMHWVRQAPGQCLEWMGVIRTSTSYTIYNQKFKGRVTMTRDTSTSTVYMELSSLRSEDTAVYYCARSGPGYFDVWGQGTMVTVSSGGGGQGGGGQGGGGQDIQLTQSPSFLSASVGDRVTITCRASENIYSYLAWYQQKPGKAPKLLIYNAKTLAEGVPSRFSGSGSGTEFTLTISSLQPEDFATYYCQHNYGTPYTFGCGTKLEIKSGGGGQEVQLVESGGGLVQPGGSLKLSCAASGFTFNKYAINWVREAPGKGLEWVARIRSKYNNYATYYADAVKDRFTISRDDSKNTAYLQMNNLKTEDTAVYYCVRNANFGTSYISYFAYWGQGTLVTVSSGGGGQGGGGQGGGGQQTVVTQEPSLTVSPGGTVTLTCGSSTGAVTSGNYPNWVQKKPGQAPRGLIGGTKFLAPGTPARFSGSLLGGKAALTLSGVQPEDEAEYYCVLWYSNRWVFGSGTKLTVL

SEQ ID NO: 286 - protein, 1506 aa, Artificial Sequence
  Synthetic
QVQLQESGPGLVKPSETLSLTCTVSGGSISSSSYFWGWIRQPPGKCLEWIGNIYYSGSSNYNPSLKSRVTISVDTSKNQFSLKLSSVTAADTAVYYCARLPRGDRDAFDIWGQGTMVTVSSGGGGSGGGGSGGGGSDIVMTQSPSSLSASVGDRVTITCRASQGISNYLAWYQQKPGKVPKLLIYAASTLQSGVPSRFSGSGSGTDFTLTISSLQPEDFATYYCQQSYSTPFTFGCGTKVEIKSGGGGSEVQLVESGGGLVQPGGSLKLSCAASGFTFNKYAINWVREAPGKGLEWVARIRSKYNNYATYYADAVKDRFTISRDDSKNTAYLQMNNLKTEDTAVYYCVRNANFGTSYISYFAYWGQGTLVTVSSGGGGSGGGGSGGGGSQTVVTQEPSLTVSPGGTVTLTCGSSTGAVTSGNYPNWVQKKPGQAPRGLIGGTKFLAPGTPARFSGSLLGGKAALTLSGVQPEDEAEYYCVLWYSNRWVFGSGTKLTVLGGGGSGGGGSGGGGSDKTHTCPPCPAPELLGGPSVFLFPPKPKDTLMISRTPEVTCVVVDVSHEDPEVKFNWYVDGVEVHNAKTKPCEEQYGSTYRCVSVLTVLHQDWLNGKEYKCKVSNKALPAPIEKTISKAKGQPREPQVYTLPPSREEMTKNQVSLTCLVKGFYPSDIAVEWESNGQPENNYKTTPPVLDSDGSFFLYSKLTVDKSRWQQGNVFSCSVMHEALHNHYTQKSLSLSPGKGGGGSGGGGSGGGGSGGGGSGGGGSGGGGSDKTHTCPPCPAPELLGGPSVFLFPPKPKDTLMISRTPEVTCVVVDVSHEDPEVKFNWYVDGVEVHNAKTKPCEEQYGSTYRCVSVLTVLHQDWLNGKEYKCKVSNKALPAPIEKTISKAKGQPREPQVYTLPPSREEMTKNQVSLTCLVKGFYPSDIAVEWESNGQPENNYKTTPPVLDSDGSFFLYSKLTVDKSRWQQGNVFSCSVMHEALHNHYTQKSLSLSPGKGGGGSGGGGSGGGGSQVQLVQSGAEVKKPGASVKVSCKASGYTFTNYWMNWVRQAPGQCLEWMGNIAYGVKGTNYNQKFQGRVTMTVDTSSSTAYMELSRLRSDDTAVYYCATRYFYVMDYWGQGTLVTVSSGGGGSGGGGSGGGGSDIQMTQSPSSLSASVGDRVTITCRASQDISNYLNWYQQKPGKVPKLLIYYTSRLHSGVPSRFSGSGSGTDFTLTISSLQPEDVATYYCVQYAQFPLTFGCGTKVEIKSGGGGSEVQLVESGGGLVQPGGSLKLSCAASGFTFNKYAINWVREAPGKGLEWVARIRSKYNNYATYYADAVKDRFTISRDDSKNTAYLQMNNLKTEDTAVYYCVRNANFGTSYISYFAYWGQGTLVTVSSGGGGSGGGGSGGGGSQTVVTQEPSLTVSPGGTVTLTCGSSTGAVTSGNYPNWVQKKPGQAPRGLIGGTKFLAPGTPARFSGSLLGGKAALTLSGVQPEDEAEYYCVLWYSNRWVFGSGTKLTVL

SEQ ID NO: 287 - protein, 1506 aa, Artificial Sequence
  Synthetic
QVQLQESGPGLVKPSETLSLTCTVSGGSISSSSYFWGWIRQPPGKCLEWIGNIYYSGSSNYNPSLKSRVTISVDTSKNQFSLKLSSVTAADTAVYYCARLPRGDRDAFDIWGQGTMVTVSSGGGGSGGGGSGGGGSDIVMTQSPSSLSASVGDRVTITCRASQGISNYLAWYQQKPGKVPKLLIYAASTLQSGVPSRFSGSGSGTDFTLTISSLQPEDFATYYCQQSYSTPFTFGCGTKVEIKSGGGGSEVQLVESGGGLVQPGGSLKLSCAASGFTFNKYAMNWVRQAPGKCLEWVARIRSKYNNYATYYADSVKDRFTISRDDSKNTAYLQMNNLKTEDTAVYYCVRHGNFGNSYISYWAYWGQGTLVTVSSGGGGSGGGGSGGGGSQTVVTQEPSLTVSPGGTVTLTCGSSTGAVTSGNYPNWVQQKPGQAPRGLIGGTKFLAPGTPARFSGSLLGGKAALTLSGVQPEDEAEYYCVLWYSNRWVFGCGTKLTVLGGGGSGGGGSGGGGSDKTHTCPPCPAPELLGGPSVFLFPPKPKDTLMISRTPEVTCVVVDVSHEDPEVKFNWYVDGVEVHNAKTKPCEEQYGSTYRCVSVLTVLHQDWLNGKEYKCKVSNKALPAPIEKTISKAKGQPREPQVYTLPPSREEMTKNQVSLTCLVKGFYPSDIAVEWESNGQPENNYKTTPPVLDSDGSFFLYSKLTVDKSRWQQGNVFSCSVMHEALHNHYTQKSLSLSPGKGGGGSGGGGSGGGGSGGGGSGGGGSGGGGSDKTHTCPPCPAPELLGGPSVFLFPPKPKDTLMISRTPEVTCVVVDVSHEDPEVKFNWYVDGVEVHNAKTKPCEEQYGSTYRCVSVLTVLHQDWLNGKEYKCKVSNKALPAPIEKTISKAKGQPREPQVYTLPPSREEMTKNQVSLTCLVKGFYPSDIAVEWESNGQPENNYKTTPPVLDSDGSFFLYSKLTVDKSRWQQGNVFSCSVMHEALHNHYTQKSLSLSPGKGGGGSGGGGSGGGGSQVQLVQSGAEVKKPGASVKVSCKASGYTFTSYWMHWVRQAPGQCLEWMGVIYTSGSYTIYNQKFQGRVTMTRDTSTSTAYMELSSLRSEDTAVYYCARSGPGYFDVWGQGTMVTVSSGGGGSGGGGSGGGGSDIQLTQSPSFLSASVGDRVTITCRASGNIHNYLAWYQQKPGKAPKLLIYNAKTLAEGVPSRFSGSGSGTEFTLKISSLQPEDFATYYCQHFAWTPYTFGCGTKLEIKSGGGGSEVQLVESGGGLVQPGGSLKLSCAASGFTFNKYAMNWVRQAPGKCLEWVARIRSKYNNYATYYADSVKDRFTISRDDSKNTAYLQMNNLKTEDTAVYYCVRHGNFGNSYISYWAYWGQGTLVTVSSGGGGSGGGGSGGGGSQTVVTQEPSLTVSPGGTVTLTCGSSTGAVTSGNYPNWVQQKPGQAPRGLIGGTKFLAPGTPARFSGSLLGGKAALTLSGVQPEDEAEYYCVLWYSNRWVFGCGTKLTVL

SEQ ID NO: 288 - protein, 1508 aa, Artificial Sequence
  Synthetic
QVQLQESGPGLVKPSETLSLTCTVSGGSISSSSYFWGWIRQPPGKCLEWIGNIYYSGSSNYNPSLKSRVTISVDTSKNQFSLKLSSVTAADTAVYYCARLPRGDRDAFDIWGQGTMVTVSSGGGGQGGGGQGGGGQDIVMTQSPSSLSASVGDRVTITCRASQGISNYLAWYQQKPGKVPKLLIYAASTLQSGVPSRFSGSGSGTDFTLTISSLQPEDFATYYCQQSYSTPFTFGCGTKVEIKSGGGGQEVQLVESGGGLVQPGGSLKLSCAASGFTFNKYAMNWVRQAPGKGMEWVARIRSKYNNYATYYADAVKDRFTISRDDSKNTLYLQMNNLKTEDTAVYYCVRAGNFGSSYISYFAYWGQGTLVTVSSGGGGQGGGGQGGGGQQTVVTQEPSLTVSPGGTVTITCGSSTGAVTSGNYPNWIQKKPGQAPRGLIGGTKFLAPGTPARFSGSLEGGKAALTLSGVQPEDEAEYYCVLYYSNRWVFGSGTKLTVLGGGGQGGGGQGGGGQCPPCPAPELLGGPSVFLFPPKPKDTLMISRTPEVTCVVVDVSHEEPEVKFNWYVDGVEVHNAKTKPCEEQYGSTYRCVSVLTVLHQDWLNGKEYKCKVSNKALPAPIEKTISKAKGQPREPQVYTLPPSREEMTKNQVSLTCLVKGFYPSDIAVEWESNGQPENNYKTTPPVLDSDGSFFLYSKLTVDKSRWQQGNVFSCSVMHEALHNHYTQKSLSLSPGKGGGGQGGGGQGGGGQGGGGQGGGGQGGGGQCPPCPAPELLGGPSVFLFPPKPKDTLMISRTPEVTCVVVDVSHEEPEVKFNWYVDGVEVHNAKTKPCEEQYGSTYRCVSVLTVLHQDWLNGKEYKCKVSNKALPAPIEKTISKAKGQPREPQVYTLPPSREEMTKNQVSLTCLVKGFYPSDIAVEWESNGQPENNYKTTPPVLDSDGSFFLYSKLTVDKSRWQQGNVFSCSVMHEALHNHYTQKSLSLSPGKGGGGQGGGGQGGGGQEVQLLESGGGLVQPGGSLRLSCAASGFSFSSYPINWVRQAPGKCLEWVGVIWTGGGTNYASSVKGRFTISRDNSKNTVYLQMNSLRAEDTAVYYCAKSRGVYDFKGRGAMDYWGQGTLVTVSSGGGGQGGGGQGGGGQDIVMTQSPDSLAVSLGERATINCKSSQSLLYSSNQKNYFAWYQQKPGQPPKLLIYWASTRESGVPDRFSGSGSGTDFTLTISSLQAEDVAVYYCQQYYSYPYTFGCGTKLEIKSGGGGQEVQLVESGGGLVQPGGSLKLSCAASGFTFNKYAMNWVRQAPGKGMEWVARIRSKYNNYATYYADAVKDRFTISRDDSKNTLYLQMNNLKTEDTAVYYCVRAGNFGSSYISYFAYWGQGTLVTVSSGGGGQGGGGQGGGGQQTVVTQEPSLTVSPGGTVTITCGSSTGAVTSGNYPNWIQKKPGQAPRGLIGGTKFLAPGTPARFSGSLEGGKAALTLSGVQPEDEAEYYCVLYYSNRWVFGSGTKLTVL

SEQ ID NO: 289 - protein, 1496 aa, Artificial Sequence
  Synthetic
QVQLQESGPGLVKPSETLSLTCTVSGGSISSSSYFWGWIRQPPGKCLEWIGNIYYSGSSNYNPSLKSRVTISVDTSKNQFSLKLSSVTAADTAVYYCARLPRGDRDAFDIWGQGTMVTVSSGGGGQGGGGQGGGGQDIVMTQSPSSLSASVGDRVTITCRASQGISNYLAWYQQKPGKVPKLLIYAASTLQSGVPSRFSGSGSGTDFTLTISSLQPEDFATYYCQQSYSTPFTFGCGTKVEIKSGGGGQEVQLVESGGGLVQPGGSLKLSCAASGFTFNKYAMNWVRQAPGKGMEWVARIRSKYNNYATYYADAVKDRFTISRDDSKNTLYLQMNNLKTEDTAVYYCVRAGNFGSSYISYFAYWGQGTLVTVSSGGGGQGGGGQGGGGQQTVVTQEPSLTVSPGGTVTITCGSSTGAVTSGNYPNWIQKKPGQAPRGLIGGTKFLAPGTPARFSGSLEGGKAALTLSGVQPEDEAEYYCVLYYSNRWVFGSGTKLTVLGGGGQGGGGQGGGGQCPPCPAPELLGGPSVFLFPPKPKDTLMISRTPEVTCVVVDVSHEEPEVKFNWYVDGVEVHNAKTKPCEEQYGSTYRCVSVLTVLHQDWLNGKEYKCKVSNKALPAPIEKTISKAKGQPREPQVYTLPPSREEMTKNQVSLTCLVKGFYPSDIAVEWESNGQPENNYKTTPPVLDSDGSFFLYSKLTVDKSRWQQGNVFSCSVMHEALHNHYTQKSLSLSPGKGGGGQGGGGQGGGGQGGGGQGGGGQGGGGQCPPCPAPELLGGPSVFLFPPKPKDTLMISRTPEVTCVVVDVSHEEPEVKFNWYVDGVEVHNAKTKPCEEQYGSTYRCVSVLTVLHQDWLNGKEYKCKVSNKALPAPIEKTISKAKGQPREPQVYTLPPSREEMTKNQVSLTCLVKGFYPSDIAVEWESNGQPENNYKTTPPVLDSDGSFFLYSKLTVDKSRWQQGNVFSCSVMHEALHNHYTQKSLSLSPGKGGGGQGGGGQGGGGQQVQLVQSGAEVKKPGASVKVSCKASGYTFTSYWMHWVRQAPGQCLEWMGVIRTSTSYTIYNQKFKGRVTMTRDTSTSTVYMELSSLRSEDTAVYYCARSGPGYFDVWGQGTMVTVSSGGGGQGGGGQGGGGQDIQLTQSPSFLSASVGDRVTITCRASENIYSYLAWYQQKPGKAPKLLIYNAKTLAEGVPSRFSGSGSGTEFTLTISSLQPEDFATYYCQHNYGTPYTFGCGTKLEIKSGGGGQEVQLVESGGGLVQPGGSLKLSCAASGFTFNKYAMNWVRQAPGKGMEWVARIRSKYNNYATYYADAVKDRFTISRDDSKNTLYLQMNNLKTEDTAVYYCVRAGNFGSSYISYFAYWGQGTLVTVSSGGGGQGGGGQGGGGQQTVVTQEPSLTVSPGGTVTITCGSSTGAVTSGNYPNWIQKKPGQAPRGLIGGTKFLAPGTPARFSGSLEGGKAALTLSGVQPEDEAEYYCVLYYSNRWVFGSGTKLTVL

SEQ ID NO: 290 - protein, 1496 aa, Artificial Sequence
  Synthetic
QVQLQESGPGLVKPSETLSLTCTVSGGSISSSSYFWGWIRQPPGKCLEWIGNIYYSGSSNYNPSLKSRVTISVDTSKNQFSLKLSSVTAADTAVYYCARLPRGDRDAFDIWGQGTMVTVSSGGGGQGGGGQGGGGQDIVMTQSPSSLSASVGDRVTITCRASQGISNYLAWYQQKPGKVPKLLIYAASTLQSGVPSRFSGSGSGTDFTLTISSLQPEDFATYYCQQSYSTPFTFGCGTKVEIKSGGGGQEVQLVESGGGLVQPGGSLKLSCAASGFTFNKYAMNWVRQAPGKGMEWVARIRSKYNNYATYYADAVKDRFTISRDDSKNTLYLQMNNLKTEDTAVYYCVRAGNFGSSYISYFAYWGQGTLVTVSSGGGGQGGGGQGGGGQQTVVTQEPSLTVSPGGTVTITCGSSTGAVTSGNYPNWIQKKPGQAPRGLIGGTKFLAPGTPARFSGSLEGGKAALTLSGVQPEDEAEYYCVLYYSNRWVFGSGTKLTVLGGGGQGGGGQGGGGQCPPCPAPELLGGPSVFLFPPKPKDTLMISRTPEVTCVVVDVSHEEPEVKFNWYVDGVEVHNAKTKPCEEQYGSTYRCVSVLTVLHQDWLNGKEYKCKVSNKALPAPIEKTISKAKGQPREPQVYTLPPSREEMTKNQVSLTCLVKGFYPSDIAVEWESNGQPENNYKTTPPVLDSDGSFFLYSKLTVDKSRWQQGNVFSCSVMHEALHNHYTQKSLSLSPGKGGGGQGGGGQGGGGQGGGGQGGGGQGGGGQCPPCPAPELLGGPSVFLFPPKPKDTLMISRTPEVTCVVVDVSHEEPEVKFNWYVDGVEVHNAKTKPCEEQYGSTYRCVSVLTVLHQDWLNGKEYKCKVSNKALPAPIEKTISKAKGQPREPQVYTLPPSREEMTKNQVSLTCLVKGFYPSDIAVEWESNGQPENNYKTTPPVLDSDGSFFLYSKLTVDKSRWQQGNVFSCSVMHEALHNHYTQKSLSLSPGKGGGGQGGGGQGGGGQQVQLVQSGAEVKKPGASVKVSCKASGYTFTNYWMNWVRQAPGQCLEWMGNIHSKAHGTNYNQKFQGRVTMTVDTSSSTAYMELSRLRSDDTAVYYCATRYFYVMDYWGQGTLVTVSSGGGGQGGGGQGGGGQDIQMTQSPSSLSASVGDRVTITCRASQDISNYLNWYQQKPGKVPKLLIYYTSRLHSGVPSRFSGSGSGTDFTLTISSLQPEDVATYYCVQYAQFPLTFGCGTKVEIKSGGGGQEVQLVESGGGLVQPGGSLKLSCAASGFTFNKYAMNWVRQAPGKGMEWVARIRSKYNNYATYYADAVKDRFTISRDDSKNTLYLQMNNLKTEDTAVYYCVRAGNFGSSYISYFAYWGQGTLVTVSSGGGGQGGGGQGGGGQQTVVTQEPSLTVSPGGTVTITCGSSTGAVTSGNYPNWIQKKPGQAPRGLIGGTKFLAPGTPARFSGSLEGGKAALTLSGVQPEDEAEYYCVLYYSNRWVFGSGTKLTVL

SEQ ID NO: 291 - protein, 1484 aa, Artificial Sequence
  Synthetic
QVQLQESGPGLVKPSETLSLTCTVSGGSISSSSYFWGWIRQPPGKCLEWIGNIYYSGSSNYNPSLKSRVTISVDTSKNQFSLKLSSVTAADTAVYYCARLPRGDRDAFDIWGQGTMVTVSSGGGGSGGGGSGGGGSDIVMTQSPSSLSASVGDRVTITCRASQGISNYLAWYQQKPGKVPKLLIYAASTLQSGVPSRFSGSGSGTDFTLTISSLQPEDFATYYCQQSYSTPFTFGCGTKVEIKSGGGGSEVQLVESGGGLVQPGGSLKLSCAASGFTFNKYAMNWVRQAPGKGMEWVARIRSKYNNYATYYADAVKDRFTISRDDSKNTLYLQMNNLKTEDTAVYYCVRAGNFGSSYISYFAYWGQGTLVTVSSGGGGSGGGGSGGGGSQTVVTQEPSLTVSPGGTVTITCGSSTGAVTSGNYPNWIQKKPGQAPRGLIGGTKFLAPGTPARFSGSLEGGKAALTLSGVQPEDEAEYYCVLYYSNRWVFGSGTKLTVLGGGGDKTHTCPPCPAPELLGGPSVFLFPPKPKDTLMISRTPEVTCVVVDVSHEDPEVKFNWYVDGVEVHNAKTKPCEEQYGSTYRCVSVLTVLHQDWLNGKEYKCKVSNKALPAPIEKTISKAKGQPREPQVYTLPPSREEMTKNQVSLTCLVKGFYPSDIAVEWESNGQPENNYKTTPPVLDSDGSFFLYSKLTVDKSRWQQGNVFSCSVMHEALHNHYTQKSLSLSPGKGGGGSGGGGSGGGGSGGGGSGGGGSGGGGSDKTHTCPPCPAPELLGGPSVFLFPPKPKDTLMISRTPEVTCVVVDVSHEDPEVKFNWYVDGVEVHNAKTKPCEEQYGSTYRCVSVLTVLHQDWLNGKEYKCKVSNKALPAPIEKTISKAKGQPREPQVYTLPPSREEMTKNQVSLTCLVKGFYPSDIAVEWESNGQPENNYKTTPPVLDSDGSFFLYSKLTVDKSRWQQGNVFSCSVMHEALHNHYTQKSLSLSPGKGGGGQVQLVQSGAEVKKPGASVKVSCKASGYTFTNYWMNWVRQAPGQCLEWMGNIAYGVKGTNYNQKFQGRVTMTVDTSSSTAYMELSRLRSDDTAVYYCATRYFYVMDYWGQGTLVTVSSGGGGSGGGGSGGGGSDIQMTQSPSSLSASVGDRVTITCRASQDISNYLNWYQQKPGKVPKLLIYYTSRLHSGVPSRFSGSGSGTDFTLTISSLQPEDVATYYCVQYAQFPLTFGCGTKVEIKSGGGGSEVQLVESGGGLVQPGGSLKLSCAASGFTFNKYAMNWVRQAPGKGMEWVARIRSKYNNYATYYADAVKDRFTISRDDSKNTLYLQMNNLKTEDTAVYYCVRAGNFGSSYISYFAYWGQGTLVTVSSGGGGSGGGGSGGGGSQTVVTQEPSLTVSPGGTVTITCGSSTGAVTSGNYPNWIQKKPGQAPRGLIGGTKFLAPGTPARFSGSLEGGKAALTLSGVQPEDEAEYYCVLYYSNRWVFGSGTKLTVL

SEQ ID NO: 292 - protein, 1478 aa, Artificial Sequence
  Synthetic
QVQLQESGPGLVKPSETLSLTCTVSGGSISSSSYFWGWIRQPPGKCLEWIGNIYYSGSSNYNPSLKSRVTISVDTSKNQFSLKLSSVTAADTAVYYCARLPRGDRDAFDIWGQGTMVTVSSGGGGQGGGGQGGGGQDIVMTQSPSSLSASVGDRVTITCRASQGISNYLAWYQQKPGKVPKLLIYAASTLQSGVPSRFSGSGSGTDFTLTISSLQPEDFATYYCQQSYSTPFTFGCGTKVEIKSGGGGQEVQLVESGGGLVQPGGSLKLSCAASGFTFNKYAMNWVRQAPGKGMEWVARIRSKYNNYATYYADAVKDRFTISRDDSKNTLYLQMNNLKTEDTAVYYCVRAGNFGSSYISYFAYWGQGTLVTVSSGGGGQGGGGQGGGGQQTVVTQEPSLTVSPGGTVTITCGSSTGAVTSGNYPNWIQKKPGQAPRGLIGGTKFLAPGTPARFSGSLEGGKAALTLSGVQPEDEAEYYCVLYYSNRWVFGSGTKLTVLGGGGCPPCPAPELLGGPSVFLFPPKPKDTLMISRTPEVTCVVVDVSHEEPEVKFNWYVDGVEVHNAKTKPCEEQYGSTYRCVSVLTVLHQDWLNGKEYKCKVSNKALPAPIEKTISKAKGQPREPQVYTLPPSREEMTKNQVSLTCLVKGFYPSDIAVEWESNGQPENNYKTTPPVLDSDGSFFLYSKLTVDKSRWQQGNVFSCSVMHEALHNHYTQKSLSLSPGKGGGGQGGGGQGGGGQGGGGQGGGGQGGGGQCPPCPAPELLGGPSVFLFPPKPKDTLMISRTPEVTCVVVDVSHEEPEVKFNWYVDGVEVHNAKTKPCEEQYGSTYRCVSVLTVLHQDWLNGKEYKCKVSNKALPAPIEKTISKAKGQPREPQVYTLPPSREEMTKNQVSLTCLVKGFYPSDIAVEWESNGQPENNYKTTPPVLDSDGSFFLYSKLTVDKSRWQQGNVFSCSVMHEALHNHYTQKSLSLSPGKGGGGQVQLVQSGAEVVKPGASVKVSCKASGYTFTSSWMNWVRQAPGQCLEWMGRIYTGTGETKYSGKFQGRVTITRDTSASTAYMELSSLTSEDTAVYYCARQRDYGALYAMDYWGQGTLVTVSSGGGGQGGGGQGGGGQDIQLTQSPSFLSASVGDRVTITCRASDDIYSYLAWYQQKPGKAPKLLVYNAKTLAEGVPSRFSGSGSGTEFTLTISSLQPEDFATYYCQNHDRTPFTFGCGTKVDIKSGGGGQEVQLVESGGGLVQPGGSLKLSCAASGFTFNKYAMNWVRQAPGKGMEWVARIRSKYNNYATYYADAVKDRFTISRDDSKNTLYLQMNNLKTEDTAVYYCVRAGNFGSSYISYFAYWGQGTLVTVSSGGGGQGGGGQGGGGQQTVVTQEPSLTVSPGGTVTITCGSSTGAVTSGNYPNWIQKKPGQAPRGLIGGTKFLAPGTPARFSGSLEGGKAALTLSGVQPEDEAEYYCVLYYSNRWVFGSGTKLTVL

SEQ ID NO: 293 - protein, 1474 aa, Artificial Sequence
  Synthetic
QVQLQESGPGLVKPSETLSLTCTVSGGSISSSSYFWGWIRQPPGKCLEWIGNIYYSGSSNYNPSLKSRVTISVDTSKNQFSLKLSSVTAADTAVYYCARLPRGDRDAFDIWGQGTMVTVSSGGGGQGGGGQGGGGQDIVMTQSPSSLSASVGDRVTITCRASQGISNYLAWYQQKPGKVPKLLIYAASTLQSGVPSRFSGSGSGTDFTLTISSLQPEDFATYYCQQSYSTPFTFGCGTKVEIKSGGGGQEVQLVESGGGLVQPGGSLKLSCAASGFTFNKYAMNWVRQAPGKGMEWVARIRSKYNNYATYYADAVKDRFTISRDDSKNTLYLQMNNLKTEDTAVYYCVRAGNFGSSYISYFAYWGQGTLVTVSSGGGGQGGGGQGGGGQQTVVTQEPSLTVSPGGTVTITCGSSTGAVTSGNYPNWIQKKPGQAPRGLIGGTKFLAPGTPARFSGSLEGGKAALTLSGVQPEDEAEYYCVLYYSNRWVFGSGTKLTVLGGGGCPPCPAPELLGGPSVFLFPPKPKDTLMISRTPEVTCVVVDVSHEEPEVKFNWYVDGVEVHNAKTKPCEEQYGSTYRCVSVLTVLHQDWLNGKEYKCKVSNKALPAPIEKTISKAKGQPREPQVYTLPPSREEMTKNQVSLTCLVKGFYPSDIAVEWESNGQPENNYKTTPPVLDSDGSFFLYSKLTVDKSRWQQGNVFSCSVMHEALHNHYTQKSLSLSPGKGGGGQGGGGQGGGGQGGGGQGGGGQGGGGQCPPCPAPELLGGPSVFLFPPKPKDTLMISRTPEVTCVVVDVSHEEPEVKFNWYVDGVEVHNAKTKPCEEQYGSTYRCVSVLTVLHQDWLNGKEYKCKVSNKALPAPIEKTISKAKGQPREPQVYTLPPSREEMTKNQVSLTCLVKGFYPSDIAVEWESNGQPENNYKTTPPVLDSDGSFFLYSKLTVDKSRWQQGNVFSCSVMHEALHNHYTQKSLSLSPGKGGGGQVQLVQSGAEVKKPGASVKVSCKASGYTFTNYWMNWVRQAPGQCLEWMGNIHSKAHGTNYNQKFQGRVTMTVDTSSSTAYMELSRLRSDDTAVYYCATRYFYVMDYWGQGTLVTVSSGGGGQGGGGQGGGGQDIQMTQSPSSLSASVGDRVTITCRASQDISNYLNWYQQKPGKVPKLLIYYTSRLHSGVPSRFSGSGSGTDFTLTISSLQPEDVATYYCVQYAQFPLTFGCGTKVEIKSGGGGQEVQLVESGGGLVQPGGSLKLSCAASGFTFNKYAMNWVRQAPGKGMEWVARIRSKYNNYATYYADAVKDRFTISRDDSKNTLYLQMNNLKTEDTAVYYCVRAGNFGSSYISYFAYWGQGTLVTVSSGGGGQGGGGQGGGGQQTVVTQEPSLTVSPGGTVTITCGSSTGAVTSGNYPNWIQKKPGQAPRGLIGGTKFLAPGTPARFSGSLEGGKAALTLSGVQPEDEAEYYCVLYYSNRWVFGSGTKLTVL

SEQ ID NO: 294 - protein, 1518 aa, Artificial Sequence
  Synthetic
QVQLQESGPGLVKPSETLSLTCTVSGGSISSSSYFWGWIRQPPGKCLEWIGNIYYSGSSNYNPSLKSRVTISVDTSKNQFSLKLSSVTAADTAVYYCARLPRGDRDAFDIWGQGTMVTVSSGGGGSGGGGSGGGGSDIVMTQSPSSLSASVGDRVTITCRASQGISNYLAWYQQKPGKVPKLLIYAASTLQSGVPSRFSGSGSGTDFTLTISSLQPEDFATYYCQQSYSTPFTFGCGTKVEIKSGGGGSEVQLVESGGGLVQPGGSLKLSCAASGFTFNKYAMNWVRQAPGKGMEWVARIRSKYNNYATYYADAVKDRFTISRDDSKNTLYLQMNNLKTEDTAVYYCVRAGNFGSSYISYFAYWGQGTLVTVSSGGGGSGGGGSGGGGSQTVVTQEPSLTVSPGGTVTITCGSSTGAVTSGNYPNWIQKKPGQAPRGLIGGTKFLAPGTPARFSGSLEGGKAALTLSGVQPEDEAEYYCVLYYSNRWVFGSGTKLTVLGGGGSGGGGSGGGGSDKTHTCPPCPAPELLGGPSVFLFPPKPKDTLMISRTPEVTCVVVDVSHEDPEVKFNWYVDGVEVHNAKTKPCEEQYGSTYRCVSVLTVLHQDWLNGKEYKCKVSNKALPAPIEKTISKAKGQPREPQVYTLPPSREEMTKNQVSLTCLVKGFYPSDIAVEWESNGQPENNYKTTPPVLDSDGSFFLYSKLTVDKSRWQQGNVFSCSVMHEALHNHYTQKSLSLSPGKGGGGSGGGGSGGGGSGGGGSGGGGSGGGGSDKTHTCPPCPAPELLGGPSVFLFPPKPKDTLMISRTPEVTCVVVDVSHEDPEVKFNWYVDGVEVHNAKTKPCEEQYGSTYRCVSVLTVLHQDWLNGKEYKCKVSNKALPAPIEKTISKAKGQPREPQVYTLPPSREEMTKNQVSLTCLVKGFYPSDIAVEWESNGQPENNYKTTPPVLDSDGSFFLYSKLTVDKSRWQQGNVFSCSVMHEALHNHYTQKSLSLSPGKGGGGSGGGGSGGGGSEVQLLESGGGLVQPGGSLRLSCAASGFSFSSYPINWVRQAPGKCLEWVGVIWTGGGTNYASSVKGRFTISRDNSKNTVYLQMNSLRAEDTAVYYCAKSRGVYDFKGRGAMDYWGQGTLVTVSSGGGGSGGGGSGGGGSDIVMTQSPDSLAVSLGERATINCKSSQSLLYSSNQKNYFAWYQQKPGQPPKLLIYWASTRESGVPDRFSGSGSGTDFTLTISSLQAEDVAVYYCQQYYSYPYTFGCGTKLEIKSGGGGSEVQLVESGGGLVQPGGSLKLSCAASGFTFNKYAMNWVRQAPGKGMEWVARIRSKYNNYATYYADAVKDRFTISRDDSKNTLYLQMNNLKTEDTAVYYCVRAGNFGSSYISYFAYWGQGTLVTVSSGGGGSGGGGSGGGGSQTVVTQEPSLTVSPGGTVTITCGSSTGAVTSGNYPNWIQKKPGQAPRGLIGGTKFLAPGTPARFSGSLEGGKAALTLSGVQPEDEAEYYCVLYYSNRWVFGSGTKLTVL

SEQ ID NO: 295 - protein, 1474 aa, Artificial Sequence
  Synthetic
QVQLQESGPGLVKPSETLSLTCTVSGGSISSSSYFWGWIRQPPGKCLEWIGNIYYSGSSNYNPSLKSRVTISVDTSKNQFSLKLSSVTAADTAVYYCARLPRGDRDAFDIWGQGTMVTVSSGGGGQGGGGQGGGGQDIVMTQSPSSLSASVGDRVTITCRASQGISNYLAWYQQKPGKVPKLLIYAASTLQSGVPSRFSGSGSGTDFTLTISSLQPEDFATYYCQQSYSTPFTFGCGTKVEIKSGGGGQEVQLVESGGGLVQPGGSLKLSCAASGFTFNKYAINWVREAPGKGLEWVARIRSKYNNYATYYADAVKDRFTISRDDSKNTAYLQMNNLKTEDTAVYYCVRNANFGTSYISYFAYWGQGTLVTVSSGGGGQGGGGQGGGGQQTVVTQEPSLTVSPGGTVTLTCGSSTGAVTSGNYPNWVQKKPGQAPRGLIGGTKFLAPGTPARFSGSLLGGKAALTLSGVQPEDEAEYYCVLWYSNRWVFGSGTKLTVLGGGGCPPCPAPELLGGPSVFLFPPKPKDTLMISRTPEVTCVVVDVSHEEPEVKFNWYVDGVEVHNAKTKPCEEQYGSTYRCVSVLTVLHQDWLNGKEYKCKVSNKALPAPIEKTISKAKGQPREPQVYTLPPSREEMTKNQVSLTCLVKGFYPSDIAVEWESNGQPENNYKTTPPVLDSDGSFFLYSKLTVDKSRWQQGNVFSCSVMHEALHNHYTQKSLSLSPGKGGGGQGGGGQGGGGQGGGGQGGGGQGGGGQCPPCPAPELLGGPSVFLFPPKPKDTLMISRTPEVTCVVVDVSHEEPEVKFNWYVDGVEVHNAKTKPCEEQYGSTYRCVSVLTVLHQDWLNGKEYKCKVSNKALPAPIEKTISKAKGQPREPQVYTLPPSREEMTKNQVSLTCLVKGFYPSDIAVEWESNGQPENNYKTTPPVLDSDGSFFLYSKLTVDKSRWQQGNVFSCSVMHEALHNHYTQKSLSLSPGKGGGGQVQLVQSGAEVKKPGASVKVSCKASGYTFTNYWMNWVRQAPGQCLEWMGNIHSKAHGTNYNQKFQGRVTMTVDTSSSTAYMELSRLRSDDTAVYYCATRYFYVMDYWGQGTLVTVSSGGGGQGGGGQGGGGQDIQMTQSPSSLSASVGDRVTITCRASQDISNYLNWYQQKPGKVPKLLIYYTSRLHSGVPSRFSGSGSGTDFTLTISSLQPEDVATYYCVQYAQFPLTFGCGTKVEIKSGGGGQEVQLVESGGGLVQPGGSLKLSCAASGFTFNKYAINWVREAPGKGLEWVARIRSKYNNYATYYADAVKDRFTISRDDSKNTAYLQMNNLKTEDTAVYYCVRNANFGTSYISYFAYWGQGTLVTVSSGGGGQGGGGQGGGGQQTVVTQEPSLTVSPGGTVTLTCGSSTGAVTSGNYPNWVQKKPGQAPRGLIGGTKFLAPGTPARFSGSLLGGKAALTLSGVQPEDEAEYYCVLWYSNRWVFGSGTKLTVL

SEQ ID NO: 296 - protein, 1508 aa, Artificial Sequence
  Synthetic
QVQLQESGPGLVKPSETLSLTCTVSGGSISSSSYFWGWIRQPPGKCLEWIGNIYYSGSSNYNPSLKSRVTISVDTSKNQFSLKLSSVTAADTAVYYCARLPRGDRDAFDIWGQGTMVTVSSGGGGQGGGGQGGGGQDIVMTQSPSSLSASVGDRVTITCRASQGISNYLAWYQQKPGKVPKLLIYAASTLQSGVPSRFSGSGSGTDFTLTISSLQPEDFATYYCQQSYSTPFTFGCGTKVEIKSGGGGQEVQLVESGGGLVQPGGSLKLSCAASGFTFNKYAINWVREAPGKGLEWVARIRSKYNNYATYYADAVKDRFTISRDDSKNTAYLQMNNLKTEDTAVYYCVRNANFGTSYISYFAYWGQGTLVTVSSGGGGQGGGGQGGGGQQTVVTQEPSLTVSPGGTVTLTCGSSTGAVTSGNYPNWVQKKPGQAPRGLIGGTKFLAPGTPARFSGSLLGGKAALTLSGVQPEDEAEYYCVLWYSNRWVFGSGTKLTVLGGGGQGGGGQGGGGQCPPCPAPELLGGPSVFLFPPKPKDTLMISRTPEVTCVVVDVSHEEPEVKFNWYVDGVEVHNAKTKPCEEQYGSTYRCVSVLTVLHQDWLNGKEYKCKVSNKALPAPIEKTISKAKGQPREPQVYTLPPSREEMTKNQVSLTCLVKGFYPSDIAVEWESNGQPENNYKTTPPVLDSDGSFFLYSKLTVDKSRWQQGNVFSCSVMHEALHNHYTQKSLSLSPGKGGGGQGGGGQGGGGQGGGGQGGGGQGGGGQCPPCPAPELLGGPSVFLFPPKPKDTLMISRTPEVTCVVVDVSHEEPEVKFNWYVDGVEVHNAKTKPCEEQYGSTYRCVSVLTVLHQDWLNGKEYKCKVSNKALPAPIEKTISKAKGQPREPQVYTLPPSREEMTKNQVSLTCLVKGFYPSDIAVEWESNGQPENNYKTTPPVLDSDGSFFLYSKLTVDKSRWQQGNVFSCSVMHEALHNHYTQKSLSLSPGKGGGGQGGGGQGGGGQEVQLLESGGGLVQPGGSLRLSCAASGFSFSSYPINWVRQAPGKCLEWVGVIWTGGGTNYASSVKGRFTISRDNSKNTVYLQMNSLRAEDTAVYYCAKSRGVYDFKGRGAMDYWGQGTLVTVSSGGGGQGGGGQGGGGQDIVMTQSPDSLAVSLGERATINCKSSQSLLYSSNQKNYFAWYQQKPGQPPKLLIYWASTRESGVPDRFSGSGSGTDFTLTISSLQAEDVAVYYCQQYYSYPYTFGCGTKLEIKSGGGGQEVQLVESGGGLVQPGGSLKLSCAASGFTFNKYAINWVREAPGKGLEWVARIRSKYNNYATYYADAVKDRFTISRDDSKNTAYLQMNNLKTEDTAVYYCVRNANFGTSYISYFAYWGQGTLVTVSSGGGGQGGGGQGGGGQQTVVTQEPSLTVSPGGTVTLTCGSSTGAVTSGNYPNWVQKKPGQAPRGLIGGTKFLAPGTPARFSGSLLGGKAALTLSGVQPEDEAEYYCVLWYSNRWVFGSGTKLTVL

SEQ ID NO: 297 - protein, 1496 aa, Artificial Sequence
  Synthetic
QVQLQESGPGLVKPSETLSLTCTVSGGSISSSSYFWGWIRQPPGKCLEWIGNIYYSGSSNYNPSLKSRVTISVDTSKNQFSLKLSSVTAADTAVYYCARLPRGDRDAFDIWGQGTMVTVSSGGGGQGGGGQGGGGQDIVMTQSPSSLSASVGDRVTITCRASQGISNYLAWYQQKPGKVPKLLIYAASTLQSGVPSRFSGSGSGTDFTLTISSLQPEDFATYYCQQSYSTPFTFGCGTKVEIKSGGGGQEVQLVESGGGLVQPGGSLKLSCAASGFTFNKYAINWVREAPGKGLEWVARIRSKYNNYATYYADAVKDRFTISRDDSKNTAYLQMNNLKTEDTAVYYCVRNANFGTSYISYFAYWGQGTLVTVSSGGGGQGGGGQGGGGQQTVVTQEPSLTVSPGGTVTLTCGSSTGAVTSGNYPNWVQKKPGQAPRGLIGGTKFLAPGTPARFSGSLLGGKAALTLSGVQPEDEAEYYCVLWYSNRWVFGSGTKLTVLGGGGQGGGGQGGGGQCPPCPAPELLGGPSVFLFPPKPKDTLMISRTPEVTCVVVDVSHEEPEVKFNWYVDGVEVHNAKTKPCEEQYGSTYRCVSVLTVLHQDWLNGKEYKCKVSNKALPAPIEKTISKAKGQPREPQVYTLPPSREEMTKNQVSLTCLVKGFYPSDIAVEWESNGQPENNYKTTPPVLDSDGSFFLYSKLTVDKSRWQQGNVFSCSVMHEALHNHYTQKSLSLSPGKGGGGQGGGGQGGGGQGGGGQGGGGQGGGGQCPPCPAPELLGGPSVFLFPPKPKDTLMISRTPEVTCVVVDVSHEEPEVKFNWYVDGVEVHNAKTKPCEEQYGSTYRCVSVLTVLHQDWLNGKEYKCKVSNKALPAPIEKTISKAKGQPREPQVYTLPPSREEMTKNQVSLTCLVKGFYPSDIAVEWESNGQPENNYKTTPPVLDSDGSFFLYSKLTVDKSRWQQGNVFSCSVMHEALHNHYTQKSLSLSPGKGGGGQGGGGQGGGGQQVQLVQSGAEVKKPGASVKVSCKASGYTFTSYWMHWVRQAPGQCLEWMGVIRTSTSYTIYNQKFKGRVTMTRDTSTSTVYMELSSLRSEDTAVYYCARSGPGYFDVWGQGTMVTVSSGGGGQGGGGQGGGGQDIQLTQSPSFLSASVGDRVTITCRASENIYSYLAWYQQKPGKAPKLLIYNAKTLAEGVPSRFSGSGSGTEFTLTISSLQPEDFATYYCQHNYGTPYTFGCGTKLEIKSGGGGQEVQLVESGGGLVQPGGSLKLSCAASGFTFNKYAINWVREAPGKGLEWVARIRSKYNNYATYYADAVKDRFTISRDDSKNTAYLQMNNLKTEDTAVYYCVRNANFGTSYISYFAYWGQGTLVTVSSGGGGQGGGGQGGGGQQTVVTQEPSLTVSPGGTVTLTCGSSTGAVTSGNYPNWVQKKPGQAPRGLIGGTKFLAPGTPARFSGSLLGGKAALTLSGVQPEDEAEYYCVLWYSNRWVFGSGTKLTVL

SEQ ID NO: 298 - protein, 1484 aa, Artificial Sequence
  Synthetic
QVQLQESGPGLVKPSETLSLTCTVSGGSISSSSYFWGWIRQPPGKCLEWIGNIYYSGSSNYNPSLKSRVTISVDTSKNQFSLKLSSVTAADTAVYYCARLPRGDRDAFDIWGQGTMVTVSSGGGGSGGGGSGGGGSDIVMTQSPSSLSASVGDRVTITCRASQGISNYLAWYQQKPGKVPKLLIYAASTLQSGVPSRFSGSGSGTDFTLTISSLQPEDFATYYCQQSYSTPFTFGCGTKVEIKSGGGGSEVQLVESGGGLVQPGGSLKLSCAASGFTFNKYAMNWVRQAPGKGMEWVARIRSKYNNYATYYADAVKDRFTISRDDSKNTLYLQMNNLKTEDTAVYYCVRAGNFGSSYISYFAYWGQGTLVTVSSGGGGSGGGGSGGGGSQTVVTQEPSLTVSPGGTVTITCGSSTGAVTSGNYPNWIQKKPGQAPRGLIGGTKFLAPGTPARFSGSLEGGKAALTLSGVQPEDEAEYYCVLYYSNRWVFGSGTKLTVLGGGGDKTHTCPPCPAPELLGGPSVFLFPPKPKDTLMISRTPEVTCVVVDVSHEDPEVKFNWYVDGVEVHNAKTKPCEEQYGSTYRCVSVLTVLHQDWLNGKEYKCKVSNKALPAPIEKTISKAKGQPREPQVYTLPPSREEMTKNQVSLTCLVKGFYPSDIAVEWESNGQPENNYKTTPPVLDSDGSFFLYSKLTVDKSRWQQGNVFSCSVMHEALHNHYTQKSLSLSPGKGGGGSGGGGSGGGGSGGGGSGGGGSGGGGSDKTHTCPPCPAPELLGGPSVFLFPPKPKDTLMISRTPEVTCVVVDVSHEDPEVKFNWYVDGVEVHNAKTKPCEEQYGSTYRCVSVLTVLHQDWLNGKEYKCKVSNKALPAPIEKTISKAKGQPREPQVYTLPPSREEMTKNQVSLTCLVKGFYPSDIAVEWESNGQPENNYKTTPPVLDSDGSFFLYSKLTVDKSRWQQGNVFSCSVMHEALHNHYTQKSLSLSPGKGGGGQVQLVQSGAEVKKPGASVKVSCKASGYTFTSYWMHWVRQAPGQCLEWMGVIYTSGSYTIYNQKFQGRVTMTRDTSTSTAYMELSSLRSEDTAVYYCARSGPGYFDVWGQGTMVTVSSGGGGSGGGGSGGGGSDIQLTQSPSFLSASVGDRVTITCRASGNIHNYLAWYQQKPGKAPKLLIYNAKTLAEGVPSRFSGSGSGTEFTLKISSLQPEDFATYYCQHFAWTPYTFGCGTKLEIKSGGGGSEVQLVESGGGLVQPGGSLKLSCAASGFTFNKYAMNWVRQAPGKGMEWVARIRSKYNNYATYYADAVKDRFTISRDDSKNTLYLQMNNLKTEDTAVYYCVRAGNFGSSYISYFAYWGQGTLVTVSSGGGGSGGGGSGGGGSQTVVTQEPSLTVSPGGTVTITCGSSTGAVTSGNYPNWIQKKPGQAPRGLIGGTKFLAPGTPARFSGSLEGGKAALTLSGVQPEDEAEYYCVLYYSNRWVFGSGTKLTVL

SEQ ID NO: 299 - protein, 1506 aa, Artificial Sequence
  Synthetic
QVQLQESGPGLVKPSETLSLTCTVSGGSISSSSYFWGWIRQPPGKCLEWIGNIYYSGSSNYNPSLKSRVTISVDTSKNQFSLKLSSVTAADTAVYYCARLPRGDRDAFDIWGQGTMVTVSSGGGGSGGGGSGGGGSDIVMTQSPSSLSASVGDRVTITCRASQGISNYLAWYQQKPGKVPKLLIYAASTLQSGVPSRFSGSGSGTDFTLTISSLQPEDFATYYCQQSYSTPFTFGCGTKVEIKSGGGGSEVQLVESGGGLVQPGGSLKLSCAASGFTFNKYAMNWVRQAPGKGMEWVARIRSKYNNYATYYADAVKDRFTISRDDSKNTLYLQMNNLKTEDTAVYYCVRAGNFGSSYISYFAYWGQGTLVTVSSGGGGSGGGGSGGGGSQTVVTQEPSLTVSPGGTVTITCGSSTGAVTSGNYPNWIQKKPGQAPRGLIGGTKFLAPGTPARFSGSLEGGKAALTLSGVQPEDEAEYYCVLYYSNRWVFGSGTKLTVLGGGGSGGGGSGGGGSDKTHTCPPCPAPELLGGPSVFLFPPKPKDTLMISRTPEVTCVVVDVSHEDPEVKFNWYVDGVEVHNAKTKPCEEQYGSTYRCVSVLTVLHQDWLNGKEYKCKVSNKALPAPIEKTISKAKGQPREPQVYTLPPSREEMTKNQVSLTCLVKGFYPSDIAVEWESNGQPENNYKTTPPVLDSDGSFFLYSKLTVDKSRWQQGNVFSCSVMHEALHNHYTQKSLSLSPGKGGGGSGGGGSGGGGSGGGGSGGGGSGGGGSDKTHTCPPCPAPELLGGPSVFLFPPKPKDTLMISRTPEVTCVVVDVSHEDPEVKFNWYVDGVEVHNAKTKPCEEQYGSTYRCVSVLTVLHQDWLNGKEYKCKVSNKALPAPIEKTISKAKGQPREPQVYTLPPSREEMTKNQVSLTCLVKGFYPSDIAVEWESNGQPENNYKTTPPVLDSDGSFFLYSKLTVDKSRWQQGNVFSCSVMHEALHNHYTQKSLSLSPGKGGGGSGGGGSGGGGSQVQLVQSGAEVKKPGASVKVSCKASGYTFTSYWMHWVRQAPGQCLEWMGVIYTSGSYTIYNQKFQGRVTMTRDTSTSTAYMELSSLRSEDTAVYYCARSGPGYFDVWGQGTMVTVSSGGGGSGGGGSGGGGSDIQLTQSPSFLSASVGDRVTITCRASGNIHNYLAWYQQKPGKAPKLLIYNAKTLAEGVPSRFSGSGSGTEFTLKISSLQPEDFATYYCQHFAWTPYTFGCGTKLEIKSGGGGSEVQLVESGGGLVQPGGSLKLSCAASGFTFNKYAMNWVRQAPGKGMEWVARIRSKYNNYATYYADAVKDRFTISRDDSKNTLYLQMNNLKTEDTAVYYCVRAGNFGSSYISYFAYWGQGTLVTVSSGGGGSGGGGSGGGGSQTVVTQEPSLTVSPGGTVTITCGSSTGAVTSGNYPNWIQKKPGQAPRGLIGGTKFLAPGTPARFSGSLEGGKAALTLSGVQPEDEAEYYCVLYYSNRWVFGSGTKLTVL

SEQ ID NO: 300 - protein, 1474 aa, Artificial Sequence
  Synthetic
QVQLQESGPGLVKPSETLSLTCTVSGGSISSSSYFWGWIRQPPGKCLEWIGNIYYSGSSNYNPSLKSRVTISVDTSKNQFSLKLSSVTAADTAVYYCARLPRGDRDAFDIWGQGTMVTVSSGGGGQGGGGQGGGGQDIVMTQSPSSLSASVGDRVTITCRASQGISNYLAWYQQKPGKVPKLLIYAASTLQSGVPSRFSGSGSGTDFTLTISSLQPEDFATYYCQQSYSTPFTFGCGTKVEIKSGGGGQEVQLVESGGGLVQPGGSLKLSCAASGFTFNKYAINWVREAPGKGLEWVARIRSKYNNYATYYADAVKDRFTISRDDSKNTAYLQMNNLKTEDTAVYYCVRNANFGTSYISYFAYWGQGTLVTVSSGGGGQGGGGQGGGGQQTVVTQEPSLTVSPGGTVTLTCGSSTGAVTSGNYPNWVQKKPGQAPRGLIGGTKFLAPGTPARFSGSLLGGKAALTLSGVQPEDEAEYYCVLWYSNRWVFGSGTKLTVLGGGGCPPCPAPELLGGPSVFLFPPKPKDTLMISRTPEVTCVVVDVSHEEPEVKFNWYVDGVEVHNAKTKPCEEQYGSTYRCVSVLTVLHQDWLNGKEYKCKVSNKALPAPIEKTISKAKGQPREPQVYTLPPSREEMTKNQVSLTCLVKGFYPSDIAVEWESNGQPENNYKTTPPVLDSDGSFFLYSKLTVDKSRWQQGNVFSCSVMHEALHNHYTQKSLSLSPGKGGGGQGGGGQGGGGQGGGGQGGGGQGGGGQCPPCPAPELLGGPSVFLFPPKPKDTLMISRTPEVTCVVVDVSHEEPEVKFNWYVDGVEVHNAKTKPCEEQYGSTYRCVSVLTVLHQDWLNGKEYKCKVSNKALPAPIEKTISKAKGQPREPQVYTLPPSREEMTKNQVSLTCLVKGFYPSDIAVEWESNGQPENNYKTTPPVLDSDGSFFLYSKLTVDKSRWQQGNVFSCSVMHEALHNHYTQKSLSLSPGKGGGGQVQLVQSGAEVKKPGASVKVSCKASGYTFTNYWMNWVRQAPGQCLEWMGNIAYGVKGTNYNQKFQGRVTMTVDTSSSTAYMELSRLRSDDTAVYYCATRYFYVMDYWGQGTLVTVSSGGGGQGGGGQGGGGQDIQMTQSPSSLSASVGDRVTITCRASQDISNYLNWYQQKPGKVPKLLIYYTSRLHSGVPSRFSGSGSGTDFTLTISSLQPEDVATYYCVQYAQFPLTFGCGTKVEIKSGGGGQEVQLVESGGGLVQPGGSLKLSCAASGFTFNKYAINWVREAPGKGLEWVARIRSKYNNYATYYADAVKDRFTISRDDSKNTAYLQMNNLKTEDTAVYYCVRNANFGTSYISYFAYWGQGTLVTVSSGGGGQGGGGQGGGGQQTVVTQEPSLTVSPGGTVTLTCGSSTGAVTSGNYPNWVQKKPGQAPRGLIGGTKFLAPGTPARFSGSLLGGKAALTLSGVQPEDEAEYYCVLWYSNRWVFGSGTKLTVL

SEQ ID NO: 301 - protein, 1506 aa, Artificial Sequence
  Synthetic
QVQLQESGPGLVKPSETLSLTCTVSGGSISSSSYFWGWIRQPPGKCLEWIGNIYYSGSSNYNPSLKSRVTISVDTSKNQFSLKLSSVTAADTAVYYCARLPRGDRDAFDIWGQGTMVTVSSGGGGSGGGGSGGGGSDIVMTQSPSSLSASVGDRVTITCRASQGISNYLAWYQQKPGKVPKLLIYAASTLQSGVPSRFSGSGSGTDFTLTISSLQPEDFATYYCQQSYSTPFTFGCGTKVEIKSGGGGSEVQLVESGGGLVQPGGSLKLSCAASGFTFNKYAMNWVRQAPGKGMEWVARIRSKYNNYATYYADAVKDRFTISRDDSKNTLYLQMNNLKTEDTAVYYCVRAGNFGSSYISYFAYWGQGTLVTVSSGGGGSGGGGSGGGGSQTVVTQEPSLTVSPGGTVTITCGSSTGAVTSGNYPNWIQKKPGQAPRGLIGGTKFLAPGTPARFSGSLEGGKAALTLSGVQPEDEAEYYCVLYYSNRWVFGSGTKLTVLGGGGSGGGGSGGGGSDKTHTCPPCPAPELLGGPSVFLFPPKPKDTLMISRTPEVTCVVVDVSHEDPEVKFNWYVDGVEVHNAKTKPCEEQYGSTYRCVSVLTVLHQDWLNGKEYKCKVSNKALPAPIEKTISKAKGQPREPQVYTLPPSREEMTKNQVSLTCLVKGFYPSDIAVEWESNGQPENNYKTTPPVLDSDGSFFLYSKLTVDKSRWQQGNVFSCSVMHEALHNHYTQKSLSLSPGKGGGGSGGGGSGGGGSGGGGSGGGGSGGGGSDKTHTCPPCPAPELLGGPSVFLFPPKPKDTLMISRTPEVTCVVVDVSHEDPEVKFNWYVDGVEVHNAKTKPCEEQYGSTYRCVSVLTVLHQDWLNGKEYKCKVSNKALPAPIEKTISKAKGQPREPQVYTLPPSREEMTKNQVSLTCLVKGFYPSDIAVEWESNGQPENNYKTTPPVLDSDGSFFLYSKLTVDKSRWQQGNVFSCSVMHEALHNHYTQKSLSLSPGKGGGGSGGGGSGGGGSQVQLVQSGAEVKKPGASVKVSCKASGYTFTNYWMNWVRQAPGQCLEWMGNIAYGVKGTNYNQKFQGRVTMTVDTSSSTAYMELSRLRSDDTAVYYCATRYFYVMDYWGQGTLVTVSSGGGGSGGGGSGGGGSDIQMTQSPSSLSASVGDRVTITCRASQDISNYLNWYQQKPGKVPKLLIYYTSRLHSGVPSRFSGSGSGTDFTLTISSLQPEDVATYYCVQYAQFPLTFGCGTKVEIKSGGGGSEVQLVESGGGLVQPGGSLKLSCAASGFTFNKYAMNWVRQAPGKGMEWVARIRSKYNNYATYYADAVKDRFTISRDDSKNTLYLQMNNLKTEDTAVYYCVRAGNFGSSYISYFAYWGQGTLVTVSSGGGGSGGGGSGGGGSQTVVTQEPSLTVSPGGTVTITCGSSTGAVTSGNYPNWIQKKPGQAPRGLIGGTKFLAPGTPARFSGSLEGGKAALTLSGVQPEDEAEYYCVLYYSNRWVFGSGTKLTVL

SEQ ID NO: 302 - protein, 1496 aa, Artificial Sequence
  Synthetic
QVQLQESGPGLVKPSETLSLTCTVSGGSISSSSYFWGWIRQPPGKCLEWIGNIYYSGSSNYNPSLKSRVTISVDTSKNQFSLKLSSVTAADTAVYYCARLPRGDRDAFDIWGQGTMVTVSSGGGGSGGGGSGGGGSDIVMTQSPSSLSASVGDRVTITCRASQGISNYLAWYQQKPGKVPKLLIYAASTLQSGVPSRFSGSGSGTDFTLTISSLQPEDFATYYCQQSYSTPFTFGCGTKVEIKSGGGGSEVQLVESGGGLVQPGGSLKLSCAASGFTFNKYAMNWVRQAPGKGMEWVARIRSKYNNYATYYADAVKDRFTISRDDSKNTLYLQMNNLKTEDTAVYYCVRAGNFGSSYISYFAYWGQGTLVTVSSGGGGSGGGGSGGGGSQTVVTQEPSLTVSPGGTVTITCGSSTGAVTSGNYPNWIQKKPGQAPRGLIGGTKFLAPGTPARFSGSLEGGKAALTLSGVQPEDEAEYYCVLYYSNRWVFGSGTKLTVLGGGGDKTHTCPPCPAPELLGGPSVFLFPPKPKDTLMISRTPEVTCVVVDVSHEDPEVKFNWYVDGVEVHNAKTKPCEEQYGSTYRCVSVLTVLHQDWLNGKEYKCKVSNKALPAPIEKTISKAKGQPREPQVYTLPPSREEMTKNQVSLTCLVKGFYPSDIAVEWESNGQPENNYKTTPPVLDSDGSFFLYSKLTVDKSRWQQGNVFSCSVMHEALHNHYTQKSLSLSPGKGGGGSGGGGSGGGGSGGGGSGGGGSGGGGSDKTHTCPPCPAPELLGGPSVFLFPPKPKDTLMISRTPEVTCVVVDVSHEDPEVKFNWYVDGVEVHNAKTKPCEEQYGSTYRCVSVLTVLHQDWLNGKEYKCKVSNKALPAPIEKTISKAKGQPREPQVYTLPPSREEMTKNQVSLTCLVKGFYPSDIAVEWESNGQPENNYKTTPPVLDSDGSFFLYSKLTVDKSRWQQGNVFSCSVMHEALHNHYTQKSLSLSPGKGGGGEVQLLESGGGLVQPGGSLRLSCAASGFSFSSYPINWVRQAPGKCLEWVGVIWTGGGTNYASSVKGRFTISRDNSKNTVYLQMNSLRAEDTAVYYCAKSRGVYDFKGRGAMDYWGQGTLVTVSSGGGGSGGGGSGGGGSDIVMTQSPDSLAVSLGERATINCKSSQSLLYSSNQKNYFAWYQQKPGQPPKLLIYWASTRESGVPDRFSGSGSGTDFTLTISSLQAEDVAVYYCQQYYSYPYTFGCGTKLEIKSGGGGSEVQLVESGGGLVQPGGSLKLSCAASGFTFNKYAMNWVRQAPGKGMEWVARIRSKYNNYATYYADAVKDRFTISRDDSKNTLYLQMNNLKTEDTAVYYCVRAGNFGSSYISYFAYWGQGTLVTVSSGGGGSGGGGSGGGGSQTVVTQEPSLTVSPGGTVTITCGSSTGAVTSGNYPNWIQKKPGQAPRGLIGGTKFLAPGTPARFSGSLEGGKAALTLSGVQPEDEAEYYCVLYYSNRWVFGSGTKLTVL

SEQ ID NO: 303 - protein, 1488 aa, Artificial Sequence
  Synthetic
QVQLQESGPGLVKPSETLSLTCTVSGGSISSSSYFWGWIRQPPGKCLEWIGNIYYSGSSNYNPSLKSRVTISVDTSKNQFSLKLSSVTAADTAVYYCARLPRGDRDAFDIWGQGTMVTVSSGGGGSGGGGSGGGGSDIVMTQSPSSLSASVGDRVTITCRASQGISNYLAWYQQKPGKVPKLLIYAASTLQSGVPSRFSGSGSGTDFTLTISSLQPEDFATYYCQQSYSTPFTFGCGTKVEIKSGGGGSEVQLVESGGGLVQPGGSLKLSCAASGFTFNKYAMNWVRQAPGKGMEWVARIRSKYNNYATYYADAVKDRFTISRDDSKNTLYLQMNNLKTEDTAVYYCVRAGNFGSSYISYFAYWGQGTLVTVSSGGGGSGGGGSGGGGSQTVVTQEPSLTVSPGGTVTITCGSSTGAVTSGNYPNWIQKKPGQAPRGLIGGTKFLAPGTPARFSGSLEGGKAALTLSGVQPEDEAEYYCVLYYSNRWVFGSGTKLTVLGGGGDKTHTCPPCPAPELLGGPSVFLFPPKPKDTLMISRTPEVTCVVVDVSHEDPEVKFNWYVDGVEVHNAKTKPCEEQYGSTYRCVSVLTVLHQDWLNGKEYKCKVSNKALPAPIEKTISKAKGQPREPQVYTLPPSREEMTKNQVSLTCLVKGFYPSDIAVEWESNGQPENNYKTTPPVLDSDGSFFLYSKLTVDKSRWQQGNVFSCSVMHEALHNHYTQKSLSLSPGKGGGGSGGGGSGGGGSGGGGSGGGGSGGGGSDKTHTCPPCPAPELLGGPSVFLFPPKPKDTLMISRTPEVTCVVVDVSHEDPEVKFNWYVDGVEVHNAKTKPCEEQYGSTYRCVSVLTVLHQDWLNGKEYKCKVSNKALPAPIEKTISKAKGQPREPQVYTLPPSREEMTKNQVSLTCLVKGFYPSDIAVEWESNGQPENNYKTTPPVLDSDGSFFLYSKLTVDKSRWQQGNVFSCSVMHEALHNHYTQKSLSLSPGKGGGGQVQLVQSGAEVVKPGASVKVSCKASGYTFTSSWMNWVRQAPGQCLEWMGRIYTGTGETKYSGKFQGRVTITRDTSASTAYMELSSLTSEDTAVYYCARQRDYGALYAMDYWGQGTLVTVSSGGGGSGGGGSGGGGSDIQLTQSPSFLSASVGDRVTITCRASDDIYSYLAWYQQKPGKAPKLLVYNAKTLAEGVPSRFSGSGSGTEFTLTISSLQPEDFATYYCQNHDRTPFTFGCGTKVDIKSGGGGSEVQLVESGGGLVQPGGSLKLSCAASGFTFNKYAMNWVRQAPGKGMEWVARIRSKYNNYATYYADAVKDRFTISRDDSKNTLYLQMNNLKTEDTAVYYCVRAGNFGSSYISYFAYWGQGTLVTVSSGGGGSGGGGSGGGGSQTVVTQEPSLTVSPGGTVTITCGSSTGAVTSGNYPNWIQKKPGQAPRGLIGGTKFLAPGTPARFSGSLEGGKAALTLSGVQPEDEAEYYCVLYYSNRWVFGSGTKLTVL

SEQ ID NO: 304 - protein, 1484 aa, Artificial Sequence
  Synthetic
QVQLQESGPGLVKPSETLSLTCTVSGGSISSSSYFWGWIRQPPGKCLEWIGNIYYSGSSNYNPSLKSRVTISVDTSKNQFSLKLSSVTAADTAVYYCARLPRGDRDAFDIWGQGTMVTVSSGGGGSGGGGSGGGGSDIVMTQSPSSLSASVGDRVTITCRASQGISNYLAWYQQKPGKVPKLLIYAASTLQSGVPSRFSGSGSGTDFTLTISSLQPEDFATYYCQQSYSTPFTFGCGTKVEIKSGGGGSEVQLVESGGGLVQPGGSLKLSCAASGFTFNKYAMNWVRQAPGKGMEWVARIRSKYNNYATYYADAVKDRFTISRDDSKNTLYLQMNNLKTEDTAVYYCVRAGNFGSSYISYFAYWGQGTLVTVSSGGGGSGGGGSGGGGSQTVVTQEPSLTVSPGGTVTITCGSSTGAVTSGNYPNWIQKKPGQAPRGLIGGTKFLAPGTPARFSGSLEGGKAALTLSGVQPEDEAEYYCVLYYSNRWVFGSGTKLTVLGGGGDKTHTCPPCPAPELLGGPSVFLFPPKPKDTLMISRTPEVTCVVVDVSHEDPEVKFNWYVDGVEVHNAKTKPCEEQYGSTYRCVSVLTVLHQDWLNGKEYKCKVSNKALPAPIEKTISKAKGQPREPQVYTLPPSREEMTKNQVSLTCLVKGFYPSDIAVEWESNGQPENNYKTTPPVLDSDGSFFLYSKLTVDKSRWQQGNVFSCSVMHEALHNHYTQKSLSLSPGKGGGGSGGGGSGGGGSGGGGSGGGGSGGGGSDKTHTCPPCPAPELLGGPSVFLFPPKPKDTLMISRTPEVTCVVVDVSHEDPEVKFNWYVDGVEVHNAKTKPCEEQYGSTYRCVSVLTVLHQDWLNGKEYKCKVSNKALPAPIEKTISKAKGQPREPQVYTLPPSREEMTKNQVSLTCLVKGFYPSDIAVEWESNGQPENNYKTTPPVLDSDGSFFLYSKLTVDKSRWQQGNVFSCSVMHEALHNHYTQKSLSLSPGKGGGGQVQLVQSGAEVKKPGASVKVSCKASGYTFTNYWMNWVRQAPGQCLEWMGNIHSKAHGTNYNQKFQGRVTMTVDTSSSTAYMELSRLRSDDTAVYYCATRYFYVMDYWGQGTLVTVSSGGGGSGGGGSGGGGSDIQMTQSPSSLSASVGDRVTITCRASQDISNYLNWYQQKPGKVPKLLIYYTSRLHSGVPSRFSGSGSGTDFTLTISSLQPEDVATYYCVQYAQFPLTFGCGTKVEIKSGGGGSEVQLVESGGGLVQPGGSLKLSCAASGFTFNKYAMNWVRQAPGKGMEWVARIRSKYNNYATYYADAVKDRFTISRDDSKNTLYLQMNNLKTEDTAVYYCVRAGNFGSSYISYFAYWGQGTLVTVSSGGGGSGGGGSGGGGSQTVVTQEPSLTVSPGGTVTITCGSSTGAVTSGNYPNWIQKKPGQAPRGLIGGTKFLAPGTPARFSGSLEGGKAALTLSGVQPEDEAEYYCVLYYSNRWVFGSGTKLTVL

SEQ ID NO: 305 - protein, 1510 aa, Artificial Sequence
  Synthetic
QVQLQESGPGLVKPSETLSLTCTVSGGSISSSSYFWGWIRQPPGKCLEWIGNIYYSGSSNYNPSLKSRVTISVDTSKNQFSLKLSSVTAADTAVYYCARLPRGDRDAFDIWGQGTMVTVSSGGGGSGGGGSGGGGSDIVMTQSPSSLSASVGDRVTITCRASQGISNYLAWYQQKPGKVPKLLIYAASTLQSGVPSRFSGSGSGTDFTLTISSLQPEDFATYYCQQSYSTPFTFGCGTKVEIKSGGGGSEVQLVESGGGLVQPGGSLKLSCAASGFTFNKYAMNWVRQAPGKGMEWVARIRSKYNNYATYYADAVKDRFTISRDDSKNTLYLQMNNLKTEDTAVYYCVRAGNFGSSYISYFAYWGQGTLVTVSSGGGGSGGGGSGGGGSQTVVTQEPSLTVSPGGTVTITCGSSTGAVTSGNYPNWIQKKPGQAPRGLIGGTKFLAPGTPARFSGSLEGGKAALTLSGVQPEDEAEYYCVLYYSNRWVFGSGTKLTVLGGGGSGGGGSGGGGSDKTHTCPPCPAPELLGGPSVFLFPPKPKDTLMISRTPEVTCVVVDVSHEDPEVKFNWYVDGVEVHNAKTKPCEEQYGSTYRCVSVLTVLHQDWLNGKEYKCKVSNKALPAPIEKTISKAKGQPREPQVYTLPPSREEMTKNQVSLTCLVKGFYPSDIAVEWESNGQPENNYKTTPPVLDSDGSFFLYSKLTVDKSRWQQGNVFSCSVMHEALHNHYTQKSLSLSPGKGGGGSGGGGSGGGGSGGGGSGGGGSGGGGSDKTHTCPPCPAPELLGGPSVFLFPPKPKDTLMISRTPEVTCVVVDVSHEDPEVKFNWYVDGVEVHNAKTKPCEEQYGSTYRCVSVLTVLHQDWLNGKEYKCKVSNKALPAPIEKTISKAKGQPREPQVYTLPPSREEMTKNQVSLTCLVKGFYPSDIAVEWESNGQPENNYKTTPPVLDSDGSFFLYSKLTVDKSRWQQGNVFSCSVMHEALHNHYTQKSLSLSPGKGGGGSGGGGSGGGGSQVQLVQSGAEVVKPGASVKVSCKASGYTFTSSWMNWVRQAPGQCLEWMGRIYTGTGETKYSGKFQGRVTITRDTSASTAYMELSSLTSEDTAVYYCARQRDYGALYAMDYWGQGTLVTVSSGGGGSGGGGSGGGGSDIQLTQSPSFLSASVGDRVTITCRASDDIYSYLAWYQQKPGKAPKLLVYNAKTLAEGVPSRFSGSGSGTEFTLTISSLQPEDFATYYCQNHDRTPFTFGCGTKVDIKSGGGGSEVQLVESGGGLVQPGGSLKLSCAASGFTFNKYAMNWVRQAPGKGMEWVARIRSKYNNYATYYADAVKDRFTISRDDSKNTLYLQMNNLKTEDTAVYYCVRAGNFGSSYISYFAYWGQGTLVTVSSGGGGSGGGGSGGGGSQTVVTQEPSLTVSPGGTVTITCGSSTGAVTSGNYPNWIQKKPGQAPRGLIGGTKFLAPGTPARFSGSLEGGKAALTLSGVQPEDEAEYYCVLYYSNRWVFGSGTKLTVL

SEQ ID NO: 306 - protein, 1484 aa, Artificial Sequence
  Synthetic
QVQLQESGPGLVKPSETLSLTCTVSGGSISSSSYFWGWIRQPPGKCLEWIGNIYYSGSSNYNPSLKSRVTISVDTSKNQFSLKLSSVTAADTAVYYCARLPRGDRDAFDIWGQGTMVTVSSGGGGSGGGGSGGGGSDIVMTQSPSSLSASVGDRVTITCRASQGISNYLAWYQQKPGKVPKLLIYAASTLQSGVPSRFSGSGSGTDFTLTISSLQPEDFATYYCQQSYSTPFTFGCGTKVEIKSGGGGSEVQLVESGGGLVQPGGSLKLSCAASGFTFNKYAMNWVRQAPGKGMEWVARIRSKYNNYATYYADAVKDRFTISRDDSKNTLYLQMNNLKTEDTAVYYCVRAGNFGSSYISYFAYWGQGTLVTVSSGGGGSGGGGSGGGGSQTVVTQEPSLTVSPGGTVTITCGSSTGAVTSGNYPNWIQKKPGQAPRGLIGGTKFLAPGTPARFSGSLEGGKAALTLSGVQPEDEAEYYCVLYYSNRWVFGSGTKLTVLGGGGDKTHTCPPCPAPELLGGPSVFLFPPKPKDTLMISRTPEVTCVVVDVSHEDPEVKFNWYVDGVEVHNAKTKPCEEQYGSTYRCVSVLTVLHQDWLNGKEYKCKVSNKALPAPIEKTISKAKGQPREPQVYTLPPSREEMTKNQVSLTCLVKGFYPSDIAVEWESNGQPENNYKTTPPVLDSDGSFFLYSKLTVDKSRWQQGNVFSCSVMHEALHNHYTQKSLSLSPGKGGGGSGGGGSGGGGSGGGGSGGGGSGGGGSDKTHTCPPCPAPELLGGPSVFLFPPKPKDTLMISRTPEVTCVVVDVSHEDPEVKFNWYVDGVEVHNAKTKPCEEQYGSTYRCVSVLTVLHQDWLNGKEYKCKVSNKALPAPIEKTISKAKGQPREPQVYTLPPSREEMTKNQVSLTCLVKGFYPSDIAVEWESNGQPENNYKTTPPVLDSDGSFFLYSKLTVDKSRWQQGNVFSCSVMHEALHNHYTQKSLSLSPGKGGGGQVQLVQSGAEVKKPGASVKVSCKASGYTFTSYWMHWVRQAPGQCLEWMGVIRTSTSYTIYNQKFKGRVTMTRDTSTSTVYMELSSLRSEDTAVYYCARSGPGYFDVWGQGTMVTVSSGGGGSGGGGSGGGGSDIQLTQSPSFLSASVGDRVTITCRASENIYSYLAWYQQKPGKAPKLLIYNAKTLAEGVPSRFSGSGSGTEFTLTISSLQPEDFATYYCQHNYGTPYTFGCGTKLEIKSGGGGSEVQLVESGGGLVQPGGSLKLSCAASGFTFNKYAMNWVRQAPGKGMEWVARIRSKYNNYATYYADAVKDRFTISRDDSKNTLYLQMNNLKTEDTAVYYCVRAGNFGSSYISYFAYWGQGTLVTVSSGGGGSGGGGSGGGGSQTVVTQEPSLTVSPGGTVTITCGSSTGAVTSGNYPNWIQKKPGQAPRGLIGGTKFLAPGTPARFSGSLEGGKAALTLSGVQPEDEAEYYCVLYYSNRWVFGSGTKLTVL

SEQ ID NO: 307 - protein, 1488 aa, Artificial Sequence
  Synthetic
QVQLQESGPGLVKPSETLSLTCTVSGGSISSSSYFWGWIRQPPGKCLEWIGNIYYSGSSNYNPSLKSRVTISVDTSKNQFSLKLSSVTAADTAVYYCARLPRGDRDAFDIWGQGTMVTVSSGGGGSGGGGSGGGGSDIVMTQSPSSLSASVGDRVTITCRASQGISNYLAWYQQKPGKVPKLLIYAASTLQSGVPSRFSGSGSGTDFTLTISSLQPEDFATYYCQQSYSTPFTFGCGTKVEIKSGGGGSEVQLVESGGGLVQPGGSLKLSCAASGFTFNKYAINWVREAPGKGLEWVARIRSKYNNYATYYADAVKDRFTISRDDSKNTAYLQMNNLKTEDTAVYYCVRNANFGTSYISYFAYWGQGTLVTVSSGGGGSGGGGSGGGGSQTVVTQEPSLTVSPGGTVTLTCGSSTGAVTSGNYPNWVQKKPGQAPRGLIGGTKFLAPGTPARFSGSLLGGKAALTLSGVQPEDEAEYYCVLWYSNRWVFGSGTKLTVLGGGGDKTHTCPPCPAPELLGGPSVFLFPPKPKDTLMISRTPEVTCVVVDVSHEDPEVKFNWYVDGVEVHNAKTKPCEEQYGSTYRCVSVLTVLHQDWLNGKEYKCKVSNKALPAPIEKTISKAKGQPREPQVYTLPPSREEMTKNQVSLTCLVKGFYPSDIAVEWESNGQPENNYKTTPPVLDSDGSFFLYSKLTVDKSRWQQGNVFSCSVMHEALHNHYTQKSLSLSPGKGGGGSGGGGSGGGGSGGGGSGGGGSGGGGSDKTHTCPPCPAPELLGGPSVFLFPPKPKDTLMISRTPEVTCVVVDVSHEDPEVKFNWYVDGVEVHNAKTKPCEEQYGSTYRCVSVLTVLHQDWLNGKEYKCKVSNKALPAPIEKTISKAKGQPREPQVYTLPPSREEMTKNQVSLTCLVKGFYPSDIAVEWESNGQPENNYKTTPPVLDSDGSFFLYSKLTVDKSRWQQGNVFSCSVMHEALHNHYTQKSLSLSPGKGGGGQVQLVQSGAEVVKPGASVKVSCKASGYTFTSSWMNWVRQAPGQCLEWMGRIYTGTGETKYSGKFQGRVTITRDTSASTAYMELSSLTSEDTAVYYCARQRDYGALYAMDYWGQGTLVTVSSGGGGSGGGGSGGGGSDIQLTQSPSFLSASVGDRVTITCRASDDIYSYLAWYQQKPGKAPKLLVYNAKTLAEGVPSRFSGSGSGTEFTLTISSLQPEDFATYYCQNHDRTPFTFGCGTKVDIKSGGGGSEVQLVESGGGLVQPGGSLKLSCAASGFTFNKYAINWVREAPGKGLEWVARIRSKYNNYATYYADAVKDRFTISRDDSKNTAYLQMNNLKTEDTAVYYCVRNANFGTSYISYFAYWGQGTLVTVSSGGGGSGGGGSGGGGSQTVVTQEPSLTVSPGGTVTLTCGSSTGAVTSGNYPNWVQKKPGQAPRGLIGGTKFLAPGTPARFSGSLLGGKAALTLSGVQPEDEAEYYCVLWYSNRWVFGSGTKLTVL

SEQ ID NO: 308 - protein, 1484 aa, Artificial Sequence
  Synthetic
QVQLQESGPGLVKPSETLSLTCTVSGGSISSSSYFWGWIRQPPGKCLEWIGNIYYSGSSNYNPSLKSRVTISVDTSKNQFSLKLSSVTAADTAVYYCARLPRGDRDAFDIWGQGTMVTVSSGGGGSGGGGSGGGGSDIVMTQSPSSLSASVGDRVTITCRASQGISNYLAWYQQKPGKVPKLLIYAASTLQSGVPSRFSGSGSGTDFTLTISSLQPEDFATYYCQQSYSTPFTFGCGTKVEIKSGGGGSEVQLVESGGGLVQPGGSLKLSCAASGFTFNKYAINWVREAPGKGLEWVARIRSKYNNYATYYADAVKDRFTISRDDSKNTAYLQMNNLKTEDTAVYYCVRNANFGTSYISYFAYWGQGTLVTVSSGGGGSGGGGSGGGGSQTVVTQEPSLTVSPGGTVTLTCGSSTGAVTSGNYPNWVQKKPGQAPRGLIGGTKFLAPGTPARFSGSLLGGKAALTLSGVQPEDEAEYYCVLWYSNRWVFGSGTKLTVLGGGGDKTHTCPPCPAPELLGGPSVFLFPPKPKDTLMISRTPEVTCVVVDVSHEDPEVKFNWYVDGVEVHNAKTKPCEEQYGSTYRCVSVLTVLHQDWLNGKEYKCKVSNKALPAPIEKTISKAKGQPREPQVYTLPPSREEMTKNQVSLTCLVKGFYPSDIAVEWESNGQPENNYKTTPPVLDSDGSFFLYSKLTVDKSRWQQGNVFSCSVMHEALHNHYTQKSLSLSPGKGGGGSGGGGSGGGGSGGGGSGGGGSGGGGSDKTHTCPPCPAPELLGGPSVFLFPPKPKDTLMISRTPEVTCVVVDVSHEDPEVKFNWYVDGVEVHNAKTKPCEEQYGSTYRCVSVLTVLHQDWLNGKEYKCKVSNKALPAPIEKTISKAKGQPREPQVYTLPPSREEMTKNQVSLTCLVKGFYPSDIAVEWESNGQPENNYKTTPPVLDSDGSFFLYSKLTVDKSRWQQGNVFSCSVMHEALHNHYTQKSLSLSPGKGGGGQVQLVQSGAEVKKPGASVKVSCKASGYTFTNYWMNWVRQAPGQCLEWMGNIHSKAHGTNYNQKFQGRVTMTVDTSSSTAYMELSRLRSDDTAVYYCATRYFYVMDYWGQGTLVTVSSGGGGSGGGGSGGGGSDIQMTQSPSSLSASVGDRVTITCRASQDISNYLNWYQQKPGKVPKLLIYYTSRLHSGVPSRFSGSGSGTDFTLTISSLQPEDVATYYCVQYAQFPLTFGCGTKVEIKSGGGGSEVQLVESGGGLVQPGGSLKLSCAASGFTFNKYAINWVREAPGKGLEWVARIRSKYNNYATYYADAVKDRFTISRDDSKNTAYLQMNNLKTEDTAVYYCVRNANFGTSYISYFAYWGQGTLVTVSSGGGGSGGGGSGGGGSQTVVTQEPSLTVSPGGTVTLTCGSSTGAVTSGNYPNWVQKKPGQAPRGLIGGTKFLAPGTPARFSGSLLGGKAALTLSGVQPEDEAEYYCVLWYSNRWVFGSGTKLTVL

SEQ ID NO: 309 - protein, 1496 aa, Artificial Sequence
  Synthetic
QVQLQESGPGLVKPSETLSLTCTVSGGSISSSSYFWGWIRQPPGKCLEWIGNIYYSGSSNYNPSLKSRVTISVDTSKNQFSLKLSSVTAADTAVYYCARLPRGDRDAFDIWGQGTMVTVSSGGGGSGGGGSGGGGSDIVMTQSPSSLSASVGDRVTITCRASQGISNYLAWYQQKPGKVPKLLIYAASTLQSGVPSRFSGSGSGTDFTLTISSLQPEDFATYYCQQSYSTPFTFGCGTKVEIKSGGGGSEVQLVESGGGLVQPGGSLKLSCAASGFTFNKYAINWVREAPGKGLEWVARIRSKYNNYATYYADAVKDRFTISRDDSKNTAYLQMNNLKTEDTAVYYCVRNANFGTSYISYFAYWGQGTLVTVSSGGGGSGGGGSGGGGSQTVVTQEPSLTVSPGGTVTLTCGSSTGAVTSGNYPNWVQKKPGQAPRGLIGGTKFLAPGTPARFSGSLLGGKAALTLSGVQPEDEAEYYCVLWYSNRWVFGSGTKLTVLGGGGDKTHTCPPCPAPELLGGPSVFLFPPKPKDTLMISRTPEVTCVVVDVSHEDPEVKFNWYVDGVEVHNAKTKPCEEQYGSTYRCVSVLTVLHQDWLNGKEYKCKVSNKALPAPIEKTISKAKGQPREPQVYTLPPSREEMTKNQVSLTCLVKGFYPSDIAVEWESNGQPENNYKTTPPVLDSDGSFFLYSKLTVDKSRWQQGNVFSCSVMHEALHNHYTQKSLSLSPGKGGGGSGGGGSGGGGSGGGGSGGGGSGGGGSDKTHTCPPCPAPELLGGPSVFLFPPKPKDTLMISRTPEVTCVVVDVSHEDPEVKFNWYVDGVEVHNAKTKPCEEQYGSTYRCVSVLTVLHQDWLNGKEYKCKVSNKALPAPIEKTISKAKGQPREPQVYTLPPSREEMTKNQVSLTCLVKGFYPSDIAVEWESNGQPENNYKTTPPVLDSDGSFFLYSKLTVDKSRWQQGNVFSCSVMHEALHNHYTQKSLSLSPGKGGGGEVQLLESGGGLVQPGGSLRLSCAASGFSFSSYPINWVRQAPGKCLEWVGVIWTGGGTNYASSVKGRFTISRDNSKNTVYLQMNSLRAEDTAVYYCAKSRGVYDFKGRGAMDYWGQGTLVTVSSGGGGSGGGGSGGGGSDIVMTQSPDSLAVSLGERATINCKSSQSLLYSSNQKNYFAWYQQKPGQPPKLLIYWASTRESGVPDRFSGSGSGTDFTLTISSLQAEDVAVYYCQQYYSYPYTFGCGTKLEIKSGGGGSEVQLVESGGGLVQPGGSLKLSCAASGFTFNKYAINWVREAPGKGLEWVARIRSKYNNYATYYADAVKDRFTISRDDSKNTAYLQMNNLKTEDTAVYYCVRNANFGTSYISYFAYWGQGTLVTVSSGGGGSGGGGSGGGGSQTVVTQEPSLTVSPGGTVTLTCGSSTGAVTSGNYPNWVQKKPGQAPRGLIGGTKFLAPGTPARFSGSLLGGKAALTLSGVQPEDEAEYYCVLWYSNRWVFGSGTKLTVL

SEQ ID NO: 310 - protein, 1484 aa, Artificial Sequence
  Synthetic
QVQLQESGPGLVKPSETLSLTCTVSGGSISSSSYFWGWIRQPPGKCLEWIGNIYYSGSSNYNPSLKSRVTISVDTSKNQFSLKLSSVTAADTAVYYCARLPRGDRDAFDIWGQGTMVTVSSGGGGSGGGGSGGGGSDIVMTQSPSSLSASVGDRVTITCRASQGISNYLAWYQQKPGKVPKLLIYAASTLQSGVPSRFSGSGSGTDFTLTISSLQPEDFATYYCQQSYSTPFTFGCGTKVEIKSGGGGSEVQLVESGGGLVQPGGSLKLSCAASGFTFNKYAINWVREAPGKGLEWVARIRSKYNNYATYYADAVKDRFTISRDDSKNTAYLQMNNLKTEDTAVYYCVRNANFGTSYISYFAYWGQGTLVTVSSGGGGSGGGGSGGGGSQTVVTQEPSLTVSPGGTVTLTCGSSTGAVTSGNYPNWVQKKPGQAPRGLIGGTKFLAPGTPARFSGSLLGGKAALTLSGVQPEDEAEYYCVLWYSNRWVFGSGTKLTVLGGGGDKTHTCPPCPAPELLGGPSVFLFPPKPKDTLMISRTPEVTCVVVDVSHEDPEVKFNWYVDGVEVHNAKTKPCEEQYGSTYRCVSVLTVLHQDWLNGKEYKCKVSNKALPAPIEKTISKAKGQPREPQVYTLPPSREEMTKNQVSLTCLVKGFYPSDIAVEWESNGQPENNYKTTPPVLDSDGSFFLYSKLTVDKSRWQQGNVFSCSVMHEALHNHYTQKSLSLSPGKGGGGSGGGGSGGGGSGGGGSGGGGSGGGGSDKTHTCPPCPAPELLGGPSVFLFPPKPKDTLMISRTPEVTCVVVDVSHEDPEVKFNWYVDGVEVHNAKTKPCEEQYGSTYRCVSVLTVLHQDWLNGKEYKCKVSNKALPAPIEKTISKAKGQPREPQVYTLPPSREEMTKNQVSLTCLVKGFYPSDIAVEWESNGQPENNYKTTPPVLDSDGSFFLYSKLTVDKSRWQQGNVFSCSVMHEALHNHYTQKSLSLSPGKGGGGQVQLVQSGAEVKKPGASVKVSCKASGYTFTSYWMHWVRQAPGQCLEWMGVIRTSTSYTIYNQKFKGRVTMTRDTSTSTVYMELSSLRSEDTAVYYCARSGPGYFDVWGQGTMVTVSSGGGGSGGGGSGGGGSDIQLTQSPSFLSASVGDRVTITCRASENIYSYLAWYQQKPGKAPKLLIYNAKTLAEGVPSRFSGSGSGTEFTLTISSLQPEDFATYYCQHNYGTPYTFGCGTKLEIKSGGGGSEVQLVESGGGLVQPGGSLKLSCAASGFTFNKYAINWVREAPGKGLEWVARIRSKYNNYATYYADAVKDRFTISRDDSKNTAYLQMNNLKTEDTAVYYCVRNANFGTSYISYFAYWGQGTLVTVSSGGGGSGGGGSGGGGSQTVVTQEPSLTVSPGGTVTLTCGSSTGAVTSGNYPNWVQKKPGQAPRGLIGGTKFLAPGTPARFSGSLLGGKAALTLSGVQPEDEAEYYCVLWYSNRWVFGSGTKLTVL

SEQ ID NO: 311 - protein, 1510 aa, Artificial Sequence
  Synthetic
QVQLQESGPGLVKPSETLSLTCTVSGGSISSSSYFWGWIRQPPGKCLEWIGNIYYSGSSNYNPSLKSRVTISVDTSKNQFSLKLSSVTAADTAVYYCARLPRGDRDAFDIWGQGTMVTVSSGGGGSGGGGSGGGGSDIVMTQSPSSLSASVGDRVTITCRASQGISNYLAWYQQKPGKVPKLLIYAASTLQSGVPSRFSGSGSGTDFTLTISSLQPEDFATYYCQQSYSTPFTFGCGTKVEIKSGGGGSEVQLVESGGGLVQPGGSLKLSCAASGFTFNKYAINWVREAPGKGLEWVARIRSKYNNYATYYADAVKDRFTISRDDSKNTAYLQMNNLKTEDTAVYYCVRNANFGTSYISYFAYWGQGTLVTVSSGGGGSGGGGSGGGGSQTVVTQEPSLTVSPGGTVTLTCGSSTGAVTSGNYPNWVQKKPGQAPRGLIGGTKFLAPGTPARFSGSLLGGKAALTLSGVQPEDEAEYYCVLWYSNRWVFGSGTKLTVLGGGGSGGGGSGGGGSDKTHTCPPCPAPELLGGPSVFLFPPKPKDTLMISRTPEVTCVVVDVSHEDPEVKFNWYVDGVEVHNAKTKPCEEQYGSTYRCVSVLTVLHQDWLNGKEYKCKVSNKALPAPIEKTISKAKGQPREPQVYTLPPSREEMTKNQVSLTCLVKGFYPSDIAVEWESNGQPENNYKTTPPVLDSDGSFFLYSKLTVDKSRWQQGNVFSCSVMHEALHNHYTQKSLSLSPGKGGGGSGGGGSGGGGSGGGGSGGGGSGGGGSDKTHTCPPCPAPELLGGPSVFLFPPKPKDTLMISRTPEVTCVVVDVSHEDPEVKFNWYVDGVEVHNAKTKPCEEQYGSTYRCVSVLTVLHQDWLNGKEYKCKVSNKALPAPIEKTISKAKGQPREPQVYTLPPSREEMTKNQVSLTCLVKGFYPSDIAVEWESNGQPENNYKTTPPVLDSDGSFFLYSKLTVDKSRWQQGNVFSCSVMHEALHNHYTQKSLSLSPGKGGGGSGGGGSGGGGSQVQLVQSGAEVVKPGASVKVSCKASGYTFTSSWMNWVRQAPGQCLEWMGRIYTGTGETKYSGKFQGRVTITRDTSASTAYMELSSLTSEDTAVYYCARQRDYGALYAMDYWGQGTLVTVSSGGGGSGGGGSGGGGSDIQLTQSPSFLSASVGDRVTITCRASDDIYSYLAWYQQKPGKAPKLLVYNAKTLAEGVPSRFSGSGSGTEFTLTISSLQPEDFATYYCQNHDRTPFTFGCGTKVDIKSGGGGSEVQLVESGGGLVQPGGSLKLSCAASGFTFNKYAINWVREAPGKGLEWVARIRSKYNNYATYYADAVKDRFTISRDDSKNTAYLQMNNLKTEDTAVYYCVRNANFGTSYISYFAYWGQGTLVTVSSGGGGSGGGGSGGGGSQTVVTQEPSLTVSPGGTVTLTCGSSTGAVTSGNYPNWVQKKPGQAPRGLIGGTKFLAPGTPARFSGSLLGGKAALTLSGVQPEDEAEYYCVLWYSNRWVFGSGTKLTVL

SEQ ID NO: 312 - protein, 1518 aa, Artificial Sequence
  Synthetic
QVQLQESGPGLVKPSETLSLTCTVSGGSISSSSYFWGWIRQPPGKCLEWIGNIYYSGSSNYNPSLKSRVTISVDTSKNQFSLKLSSVTAADTAVYYCARLPRGDRDAFDIWGQGTMVTVSSGGGGSGGGGSGGGGSDIVMTQSPSSLSASVGDRVTITCRASQGISNYLAWYQQKPGKVPKLLIYAASTLQSGVPSRFSGSGSGTDFTLTISSLQPEDFATYYCQQSYSTPFTFGCGTKVEIKSGGGGSEVQLVESGGGLVQPGGSLKLSCAASGFTFNKYAINWVREAPGKGLEWVARIRSKYNNYATYYADAVKDRFTISRDDSKNTAYLQMNNLKTEDTAVYYCVRNANFGTSYISYFAYWGQGTLVTVSSGGGGSGGGGSGGGGSQTVVTQEPSLTVSPGGTVTLTCGSSTGAVTSGNYPNWVQKKPGQAPRGLIGGTKFLAPGTPARFSGSLLGGKAALTLSGVQPEDEAEYYCVLWYSNRWVFGSGTKLTVLGGGGSGGGGSGGGGSDKTHTCPPCPAPELLGGPSVFLFPPKPKDTLMISRTPEVTCVVVDVSHEDPEVKFNWYVDGVEVHNAKTKPCEEQYGSTYRCVSVLTVLHQDWLNGKEYKCKVSNKALPAPIEKTISKAKGQPREPQVYTLPPSREEMTKNQVSLTCLVKGFYPSDIAVEWESNGQPENNYKTTPPVLDSDGSFFLYSKLTVDKSRWQQGNVFSCSVMHEALHNHYTQKSLSLSPGKGGGGSGGGGSGGGGSGGGGSGGGGSGGGGSDKTHTCPPCPAPELLGGPSVFLFPPKPKDTLMISRTPEVTCVVVDVSHEDPEVKFNWYVDGVEVHNAKTKPCEEQYGSTYRCVSVLTVLHQDWLNGKEYKCKVSNKALPAPIEKTISKAKGQPREPQVYTLPPSREEMTKNQVSLTCLVKGFYPSDIAVEWESNGQPENNYKTTPPVLDSDGSFFLYSKLTVDKSRWQQGNVFSCSVMHEALHNHYTQKSLSLSPGKGGGGSGGGGSGGGGSEVQLLESGGGLVQPGGSLRLSCAASGFSFSSYPINWVRQAPGKCLEWVGVIWTGGGTNYASSVKGRFTISRDNSKNTVYLQMNSLRAEDTAVYYCAKSRGVYDFKGRGAMDYWGQGTLVTVSSGGGGSGGGGSGGGGSDIVMTQSPDSLAVSLGERATINCKSSQSLLYSSNQKNYFAWYQQKPGQPPKLLIYWASTRESGVPDRFSGSGSGTDFTLTISSLQAEDVAVYYCQQYYSYPYTFGCGTKLEIKSGGGGSEVQLVESGGGLVQPGGSLKLSCAASGFTFNKYAINWVREAPGKGLEWVARIRSKYNNYATYYADAVKDRFTISRDDSKNTAYLQMNNLKTEDTAVYYCVRNANFGTSYISYFAYWGQGTLVTVSSGGGGSGGGGSGGGGSQTVVTQEPSLTVSPGGTVTLTCGSSTGAVTSGNYPNWVQKKPGQAPRGLIGGTKFLAPGTPARFSGSLLGGKAALTLSGVQPEDEAEYYCVLWYSNRWVFGSGTKLTVL

SEQ ID NO: 313 - protein, 1506 aa, Artificial Sequence
  Synthetic
QVQLQESGPGLVKPSETLSLTCTVSGGSISSSSYFWGWIRQPPGKCLEWIGNIYYSGSSNYNPSLKSRVTISVDTSKNQFSLKLSSVTAADTAVYYCARLPRGDRDAFDIWGQGTMVTVSSGGGGSGGGGSGGGGSDIVMTQSPSSLSASVGDRVTITCRASQGISNYLAWYQQKPGKVPKLLIYAASTLQSGVPSRFSGSGSGTDFTLTISSLQPEDFATYYCQQSYSTPFTFGCGTKVEIKSGGGGSEVQLVESGGGLVQPGGSLKLSCAASGFTFNKYAINWVREAPGKGLEWVARIRSKYNNYATYYADAVKDRFTISRDDSKNTAYLQMNNLKTEDTAVYYCVRNANFGTSYISYFAYWGQGTLVTVSSGGGGSGGGGSGGGGSQTVVTQEPSLTVSPGGTVTLTCGSSTGAVTSGNYPNWVQKKPGQAPRGLIGGTKFLAPGTPARFSGSLLGGKAALTLSGVQPEDEAEYYCVLWYSNRWVFGSGTKLTVLGGGGSGGGGSGGGGSDKTHTCPPCPAPELLGGPSVFLFPPKPKDTLMISRTPEVTCVVVDVSHEDPEVKFNWYVDGVEVHNAKTKPCEEQYGSTYRCVSVLTVLHQDWLNGKEYKCKVSNKALPAPIEKTISKAKGQPREPQVYTLPPSREEMTKNQVSLTCLVKGFYPSDIAVEWESNGQPENNYKTTPPVLDSDGSFFLYSKLTVDKSRWQQGNVFSCSVMHEALHNHYTQKSLSLSPGKGGGGSGGGGSGGGGSGGGGSGGGGSGGGGSDKTHTCPPCPAPELLGGPSVFLFPPKPKDTLMISRTPEVTCVVVDVSHEDPEVKFNWYVDGVEVHNAKTKPCEEQYGSTYRCVSVLTVLHQDWLNGKEYKCKVSNKALPAPIEKTISKAKGQPREPQVYTLPPSREEMTKNQVSLTCLVKGFYPSDIAVEWESNGQPENNYKTTPPVLDSDGSFFLYSKLTVDKSRWQQGNVFSCSVMHEALHNHYTQKSLSLSPGKGGGGSGGGGSGGGGSQVQLVQSGAEVKKPGASVKVSCKASGYTFTSYWMHWVRQAPGQCLEWMGVIRTSTSYTIYNQKFKGRVTMTRDTSTSTVYMELSSLRSEDTAVYYCARSGPGYFDVWGQGTMVTVSSGGGGSGGGGSGGGGSDIQLTQSPSFLSASVGDRVTITCRASENIYSYLAWYQQKPGKAPKLLIYNAKTLAEGVPSRFSGSGSGTEFTLTISSLQPEDFATYYCQHNYGTPYTFGCGTKLEIKSGGGGSEVQLVESGGGLVQPGGSLKLSCAASGFTFNKYAINWVREAPGKGLEWVARIRSKYNNYATYYADAVKDRFTISRDDSKNTAYLQMNNLKTEDTAVYYCVRNANFGTSYISYFAYWGQGTLVTVSSGGGGSGGGGSGGGGSQTVVTQEPSLTVSPGGTVTLTCGSSTGAVTSGNYPNWVQKKPGQAPRGLIGGTKFLAPGTPARFSGSLLGGKAALTLSGVQPEDEAEYYCVLWYSNRWVFGSGTKLTVL

SEQ ID NO: 314 - protein, 1506 aa, Artificial Sequence
  Synthetic
QVQLQESGPGLVKPSETLSLTCTVSGGSISSSSYFWGWIRQPPGKCLEWIGNIYYSGSSNYNPSLKSRVTISVDTSKNQFSLKLSSVTAADTAVYYCARLPRGDRDAFDIWGQGTMVTVSSGGGGSGGGGSGGGGSDIVMTQSPSSLSASVGDRVTITCRASQGISNYLAWYQQKPGKVPKLLIYAASTLQSGVPSRFSGSGSGTDFTLTISSLQPEDFATYYCQQSYSTPFTFGCGTKVEIKSGGGGSEVQLVESGGGLVQPGGSLKLSCAASGFTFNKYAINWVREAPGKGLEWVARIRSKYNNYATYYADAVKDRFTISRDDSKNTAYLQMNNLKTEDTAVYYCVRNANFGTSYISYFAYWGQGTLVTVSSGGGGSGGGGSGGGGSQTVVTQEPSLTVSPGGTVTLTCGSSTGAVTSGNYPNWVQKKPGQAPRGLIGGTKFLAPGTPARFSGSLLGGKAALTLSGVQPEDEAEYYCVLWYSNRWVFGSGTKLTVLGGGGSGGGGSGGGGSDKTHTCPPCPAPELLGGPSVFLFPPKPKDTLMISRTPEVTCVVVDVSHEDPEVKFNWYVDGVEVHNAKTKPCEEQYGSTYRCVSVLTVLHQDWLNGKEYKCKVSNKALPAPIEKTISKAKGQPREPQVYTLPPSREEMTKNQVSLTCLVKGFYPSDIAVEWESNGQPENNYKTTPPVLDSDGSFFLYSKLTVDKSRWQQGNVFSCSVMHEALHNHYTQKSLSLSPGKGGGGSGGGGSGGGGSGGGGSGGGGSGGGGSDKTHTCPPCPAPELLGGPSVFLFPPKPKDTLMISRTPEVTCVVVDVSHEDPEVKFNWYVDGVEVHNAKTKPCEEQYGSTYRCVSVLTVLHQDWLNGKEYKCKVSNKALPAPIEKTISKAKGQPREPQVYTLPPSREEMTKNQVSLTCLVKGFYPSDIAVEWESNGQPENNYKTTPPVLDSDGSFFLYSKLTVDKSRWQQGNVFSCSVMHEALHNHYTQKSLSLSPGKGGGGSGGGGSGGGGSQVQLVQSGAEVKKPGASVKVSCKASGYTFTNYWMNWVRQAPGQCLEWMGNIHSKAHGTNYNQKFQGRVTMTVDTSSSTAYMELSRLRSDDTAVYYCATRYFYVMDYWGQGTLVTVSSGGGGSGGGGSGGGGSDIQMTQSPSSLSASVGDRVTITCRASQDISNYLNWYQQKPGKVPKLLIYYTSRLHSGVPSRFSGSGSGTDFTLTISSLQPEDVATYYCVQYAQFPLTFGCGTKVEIKSGGGGSEVQLVESGGGLVQPGGSLKLSCAASGFTFNKYAINWVREAPGKGLEWVARIRSKYNNYATYYADAVKDRFTISRDDSKNTAYLQMNNLKTEDTAVYYCVRNANFGTSYISYFAYWGQGTLVTVSSGGGGSGGGGSGGGGSQTVVTQEPSLTVSPGGTVTLTCGSSTGAVTSGNYPNWVQKKPGQAPRGLIGGTKFLAPGTPARFSGSLLGGKAALTLSGVQPEDEAEYYCVLWYSNRWVFGSGTKLTVL

SEQ ID NO: 315 - protein, 1506 aa, Artificial Sequence
  Synthetic
QVQLQESGPGLVKPSETLSLTCTVSGGSISSSSYFWGWIRQPPGKCLEWIGNIYYSGSSNYNPSLKSRVTISVDTSKNQFSLKLSSVTAADTAVYYCARLPRGDRDAFDIWGQGTMVTVSSGGGGSGGGGSGGGGSDIVMTQSPSSLSASVGDRVTITCRASQGISNYLAWYQQKPGKVPKLLIYAASTLQSGVPSRFSGSGSGTDFTLTISSLQPEDFATYYCQQSYSTPFTFGCGTKVEIKSGGGGSEVQLVESGGGLVQPGGSLKLSCAASGFTFNKYAMNWVRQAPGKCLEWVARIRSKYNNYATYYADSVKDRFTISRDDSKNTAYLQMNNLKTEDTAVYYCVRHGNFGNSYISYWAYWGQGTLVTVSSGGGGSGGGGSGGGGSQTVVTQEPSLTVSPGGTVTLTCGSSTGAVTSGNYPNWVQQKPGQAPRGLIGGTKFLAPGTPARFSGSLLGGKAALTLSGVQPEDEAEYYCVLWYSNRWVFGCGTKLTVLGGGGSGGGGSGGGGSDKTHTCPPCPAPELLGGPSVFLFPPKPKDTLMISRTPEVTCVVVDVSHEDPEVKFNWYVDGVEVHNAKTKPCEEQYGSTYRCVSVLTVLHQDWLNGKEYKCKVSNKALPAPIEKTISKAKGQPREPQVYTLPPSREEMTKNQVSLTCLVKGFYPSDIAVEWESNGQPENNYKTTPPVLDSDGSFFLYSKLTVDKSRWQQGNVFSCSVMHEALHNHYTQKSLSLSPGKGGGGSGGGGSGGGGSGGGGSGGGGSGGGGSDKTHTCPPCPAPELLGGPSVFLFPPKPKDTLMISRTPEVTCVVVDVSHEDPEVKFNWYVDGVEVHNAKTKPCEEQYGSTYRCVSVLTVLHQDWLNGKEYKCKVSNKALPAPIEKTISKAKGQPREPQVYTLPPSREEMTKNQVSLTCLVKGFYPSDIAVEWESNGQPENNYKTTPPVLDSDGSFFLYSKLTVDKSRWQQGNVFSCSVMHEALHNHYTQKSLSLSPGKGGGGSGGGGSGGGGSQVQLVQSGAEVKKPGASVKVSCKASGYTFTNYWMNWVRQAPGQCLEWMGNIAYGVKGTNYNQKFQGRVTMTVDTSSSTAYMELSRLRSDDTAVYYCATRYFYVMDYWGQGTLVTVSSGGGGSGGGGSGGGGSDIQMTQSPSSLSASVGDRVTITCRASQDISNYLNWYQQKPGKVPKLLIYYTSRLHSGVPSRFSGSGSGTDFTLTISSLQPEDVATYYCVQYAQFPLTFGCGTKVEIKSGGGGSEVQLVESGGGLVQPGGSLKLSCAASGFTFNKYAMNWVRQAPGKCLEWVARIRSKYNNYATYYADSVKDRFTISRDDSKNTAYLQMNNLKTEDTAVYYCVRHGNFGNSYISYWAYWGQGTLVTVSSGGGGSGGGGSGGGGSQTVVTQEPSLTVSPGGTVTLTCGSSTGAVTSGNYPNWVQQKPGQAPRGLIGGTKFLAPGTPARFSGSLLGGKAALTLSGVQPEDEAEYYCVLWYSNRWVFGCGTKLTVL

SEQ ID NO: 316 - protein, 1489 aa, Artificial Sequence
  Synthetic
QVQLQESGPGLVKPSETLSLTCTVSGGSISSSSYFWVWIRQPPGKCLEWIGSIYYSGSTYYNPSLKSRVTISVDTSKNQFSLKLNSVTAADTAVYYCARLPRGDRMTFDIWGQGTMVTVSSGGGGSGGGGSGGGGSEIVLTQSPGTLSLSPGERATLSCRASQSVSSSYLAWYQQKPGQAPRLLIYGASSRATGIPDRFSGSGSGTDFTLTISRLEPEDFAVYYCQQYGSSPFTFGCGTKLEIKSGGGGSEVQLVESGGGLVQPGGSLKLSCAASGFTFNKYAMNWVRQAPGKGMEWVARIRSKYNNYATYYADAVKDRFTISRDDSKNTLYLQMNNLKTEDTAVYYCVRAGNFGSSYISYFAYWGQGTLVTVSSGGGGSGGGGSGGGGSQTVVTQEPSLTVSPGGTVTITCGSSTGAVTSGNYPNWIQKKPGQAPRGLIGGTKFLAPGTPARFSGSLEGGKAALTLSGVQPEDEAEYYCVLYYSNRWVFGSGTKLTVLGGGGDKTHTCPPCPAPELLGGPSVFLFPPKPKDTLMISRTPEVTCVVVDVSHEDPEVKFNWYVDGVEVHNAKTKPCEEQYGSTYRCVSVLTVLHQDWLNGKEYKCKVSNKALPAPIEKTISKAKGQPREPQVYTLPPSREEMTKNQVSLTCLVKGFYPSDIAVEWESNGQPENNYKTTPPVLDSDGSFFLYSKLTVDKSRWQQGNVFSCSVMHEALHNHYTQKSLSLSPGKGGGGSGGGGSGGGGSGGGGSGGGGSGGGGSDKTHTCPPCPAPELLGGPSVFLFPPKPKDTLMISRTPEVTCVVVDVSHEDPEVKFNWYVDGVEVHNAKTKPCEEQYGSTYRCVSVLTVLHQDWLNGKEYKCKVSNKALPAPIEKTISKAKGQPREPQVYTLPPSREEMTKNQVSLTCLVKGFYPSDIAVEWESNGQPENNYKTTPPVLDSDGSFFLYSKLTVDKSRWQQGNVFSCSVMHEALHNHYTQKSLSLSPGKGGGGQVQLVQSGAEVVKPGASVKVSCKASGYTFTSSWMNWVRQAPGQCLEWMGRIYTGTGETKYSGKFQGRVTITRDTSASTAYMELSSLTSEDTAVYYCARQRDYGALYAMDYWGQGTLVTVSSGGGGSGGGGSGGGGSDIQLTQSPSFLSASVGDRVTITCRASDDIYSYLAWYQQKPGKAPKLLVYNAKTLAEGVPSRFSGSGSGTEFTLTISSLQPEDFATYYCQNHDRTPFTFGCGTKVDIKSGGGGSEVQLVESGGGLVQPGGSLKLSCAASGFTFNKYAMNWVRQAPGKGMEWVARIRSKYNNYATYYADAVKDRFTISRDDSKNTLYLQMNNLKTEDTAVYYCVRAGNFGSSYISYFAYWGQGTLVTVSSGGGGSGGGGSGGGGSQTVVTQEPSLTVSPGGTVTITCGSSTGAVTSGNYPNWIQKKPGQAPRGLIGGTKFLAPGTPARFSGSLEGGKAALTLSGVQPEDEAEYYCVLYYSNRWVFGSGTKLTVL

SEQ ID NO: 317 - protein, 1511 aa, Artificial Sequence
  Synthetic
QVQLQESGPGLVKPSETLSLTCTVSGGSISSSSYFWVWIRQPPGKCLEWIGSIYYSGSTYYNPSLKSRVTISVDTSKNQFSLKLNSVTAADTAVYYCARLPRGDRMTFDIWGQGTMVTVSSGGGGSGGGGSGGGGSEIVLTQSPGTLSLSPGERATLSCRASQSVSSSYLAWYQQKPGQAPRLLIYGASSRATGIPDRFSGSGSGTDFTLTISRLEPEDFAVYYCQQYGSSPFTFGCGTKLEIKSGGGGSEVQLVESGGGLVQPGGSLKLSCAASGFTFNKYAMNWVRQAPGKGMEWVARIRSKYNNYATYYADAVKDRFTISRDDSKNTLYLQMNNLKTEDTAVYYCVRAGNFGSSYISYFAYWGQGTLVTVSSGGGGSGGGGSGGGGSQTVVTQEPSLTVSPGGTVTITCGSSTGAVTSGNYPNWIQKKPGQAPRGLIGGTKFLAPGTPARFSGSLEGGKAALTLSGVQPEDEAEYYCVLYYSNRWVFGSGTKLTVLGGGGSGGGGSGGGGSDKTHTCPPCPAPELLGGPSVFLFPPKPKDTLMISRTPEVTCVVVDVSHEDPEVKFNWYVDGVEVHNAKTKPCEEQYGSTYRCVSVLTVLHQDWLNGKEYKCKVSNKALPAPIEKTISKAKGQPREPQVYTLPPSREEMTKNQVSLTCLVKGFYPSDIAVEWESNGQPENNYKTTPPVLDSDGSFFLYSKLTVDKSRWQQGNVFSCSVMHEALHNHYTQKSLSLSPGKGGGGSGGGGSGGGGSGGGGSGGGGSGGGGSDKTHTCPPCPAPELLGGPSVFLFPPKPKDTLMISRTPEVTCVVVDVSHEDPEVKFNWYVDGVEVHNAKTKPCEEQYGSTYRCVSVLTVLHQDWLNGKEYKCKVSNKALPAPIEKTISKAKGQPREPQVYTLPPSREEMTKNQVSLTCLVKGFYPSDIAVEWESNGQPENNYKTTPPVLDSDGSFFLYSKLTVDKSRWQQGNVFSCSVMHEALHNHYTQKSLSLSPGKGGGGSGGGGSGGGGSQVQLVQSGAEVVKPGASVKVSCKASGYTFTSSWMNWVRQAPGQCLEWMGRIYTGTGETKYSGKFQGRVTITRDTSASTAYMELSSLTSEDTAVYYCARQRDYGALYAMDYWGQGTLVTVSSGGGGSGGGGSGGGGSDIQLTQSPSFLSASVGDRVTITCRASDDIYSYLAWYQQKPGKAPKLLVYNAKTLAEGVPSRFSGSGSGTEFTLTISSLQPEDFATYYCQNHDRTPFTFGCGTKVDIKSGGGGSEVQLVESGGGLVQPGGSLKLSCAASGFTFNKYAMNWVRQAPGKGMEWVARIRSKYNNYATYYADAVKDRFTISRDDSKNTLYLQMNNLKTEDTAVYYCVRAGNFGSSYISYFAYWGQGTLVTVSSGGGGSGGGGSGGGGSQTVVTQEPSLTVSPGGTVTITCGSSTGAVTSGNYPNWIQKKPGQAPRGLIGGTKFLAPGTPARFSGSLEGGKAALTLSGVQPEDEAEYYCVLYYSNRWVFGSGTKLTVL

SEQ ID NO: 318 - protein, 1528 aa, Artificial Sequence
  Synthetic
QVQLVESGGGVVQPGRSLRLSCAASGFTFSSYGMGWVRQAPGKCLEWVAVISYHGSNKYYADAVKGRFTISRDNSKNTLYLQMNSLRAEDTAVYYCAREGAHFGSGSYYPLYYYYAMDVWGQGTTVTVSSGGGGSGGGGSGGGGSEIVTQSPGTLSLSPGERATLSCRASQSVSSSYLAWYQQKPGQAPRLLIYGASIRATGIPDRFSGSGSGTDFTLTISRLEPEDFAVYYCQQTGSSPIFTFGCGTKVEIKSGGGGSEVQLVESGGGLVQPGGSLKLSCAASGFTFNKYAMNWVRQAPGKCLEWVARIRSKYNNYATYYADSVKDRFTISRDDSKNTAYLQMNNLKTEDTAVYYCVRHGNFGNSYISYWAYWGQGTLVTVSSGGGGSGGGGSGGGGSQTVVTQEPSLTVSPGGTVTLTCGSSTGAVTSGNYPNWVQQKPGQAPRGLIGGTKFLAPGTPARFSGSLLGGKAALTLSGVQPEDEAEYYCVLWYSNRWVFGCGTKLTVLGGGGSGGGGSGGGGSDKTHTCPPCPAPELLGGPSVFLFPPKPKDTLMISRTPEVTCVVVDVSHEDPEVKFNWYVDGVEVHNAKTKPCEEQYGSTYRCVSVLTVLHQDWLNGKEYKCKVSNKALPAPIEKTISKAKGQPREPQVYTLPPSREEMTKNQVSLTCLVKGFYPSDIAVEWESNGQPENNYKTTPPVLDSDGSFFLYSKLTVDKSRWQQGNVFSCSVMHEALHNHYTQKSLSLSPGKGGGGSGGGGSGGGGSGGGGSGGGGSGGGGSDKTHTCPPCPAPELLGGPSVFLFPPKPKDTLMISRTPEVTCVVVDVSHEDPEVKFNWYVDGVEVHNAKTKPCEEQYGSTYRCVSVLTVLHQDWLNGKEYKCKVSNKALPAPIEKTISKAKGQPREPQVYTLPPSREEMTKNQVSLTCLVKGFYPSDIAVEWESNGQPENNYKTTPPVLDSDGSFFLYSKLTVDKSRWQQGNVFSCSVMHEALHNHYTQKSLSLSPGKGGGGSGGGGSGGGGSEVQLLESGGGLVQPGGSLRLSCAASGFSFSSYPINWVRQAPGKCLEWVGVIWTGGGTNYASSVKGRFTISRDNSKNTVYLQMNSLRAEDTAVYYCAKSRGVYDFKGRGAMDYWGQGTLVTVSSGGGGSGGGGSGGGGSDIVMTQSPDSLAVSLGERATINCKSSQSLLYSSNQKNYFAWYQQKPGQPPKLLIYWASTRESGVPDRFSGSGSGTDFTLTISSLQAEDVAVYYCQQYYSYPYTFGCGTKLEIKSGGGGSEVQLVESGGGLVQPGGSLKLSCAASGFTFNKYAMNWVRQAPGKCLEWVARIRSKYNNYATYYADSVKDRFTISRDDSKNTAYLQMNNLKTEDTAVYYCVRHGNFGNSYISYWAYWGQGTLVTVSSGGGGSGGGGSGGGGSQTVVTQEPSLTVSPGGTVTLTCGSSTGAVTSGNYPNWVQQKPGQAPRGLIGGTKFLAPGTPARFSGSLLGGKAALTLSGVQPEDEAEYYCVLWYSNRWVFGCGTKLTVL

SEQ ID NO: 319 - protein, 1509 aa, Artificial Sequence
  Synthetic
QVQLVQSGAEVKKPGASVKVSCKASGYTFTGYYIHWVRQAPGQCLEWMGWINPNSGGTNYAQKFQGRVTMTRDTSISTAYMELSRLRSDDTAVYYCARVEAVAGREYYYFSGMDVWGQGTTVTVSSGGGGSGGGGSGGGGSSYELTQPPSVSVSPGQTASITCSGEKLGDKYVYWYQQKPGQSPVLVIYQSTKRPSGVPERFSGSNSGNTATLTISGTQAMDEADYYCQAYHASTAVFGCGTKLTVLSGGGGSEVQLVESGGGLVQPGGSLKLSCAASGFTFNKYAMNWVRQAPGKCLEWVARIRSKYNNYATYYADSVKDRFTISRDDSKNTAYLQMNNLKTEDTAVYYCVRHGNFGNSYISYWAYWGQGTLVTVSSGGGGSGGGGSGGGGSQTVVTQEPSLTVSPGGTVTLTCGSSTGAVTSGNYPNWVQQKPGQAPRGLIGGTKFLAPGTPARFSGSLLGGKAALTLSGVQPEDEAEYYCVLWYSNRWVFGCGTKLTVLGGGGSGGGGSGGGGSDKTHTCPPCPAPELLGGPSVFLFPPKPKDTLMISRTPEVTCVVVDVSHEDPEVKFNWYVDGVEVHNAKTKPCEEQYGSTYRCVSVLTVLHQDWLNGKEYKCKVSNKALPAPIEKTISKAKGQPREPQVYTLPPSREEMTKNQVSLTCLVKGFYPSDIAVEWESNGQPENNYKTTPPVLDSDGSFFLYSKLTVDKSRWQQGNVFSCSVMHEALHNHYTQKSLSLSPGKGGGGSGGGGSGGGGSGGGGSGGGGSGGGGSDKTHTCPPCPAPELLGGPSVFLFPPKPKDTLMISRTPEVTCVVVDVSHEDPEVKFNWYVDGVEVHNAKTKPCEEQYGSTYRCVSVLTVLHQDWLNGKEYKCKVSNKALPAPIEKTISKAKGQPREPQVYTLPPSREEMTKNQVSLTCLVKGFYPSDIAVEWESNGQPENNYKTTPPVLDSDGSFFLYSKLTVDKSRWQQGNVFSCSVMHEALHNHYTQKSLSLSPGKGGGGSGGGGSGGGGSEVQLLESGGGLVQPGGSLRLSCAASGFTFSSYWMHWVRQTPGKCLEWVSKIDPSDDYTNYNQKVKGRFTISIDKSKNTLYLQMNSLRAEDTAVYYCARWDYSHFDVWGQGTTVTVSSGGGGSGGGGSGGGGSEIVMTQSPATLSVSPGERATLTCRASSSVSYMHWYQQKPGQAPRLLIYGTSNLVSGVPARFSGSGSGTEFTLTISSLQSEDFAVYYCQQWSSYPLTFGCGTKVEIKSGGGGSEVQLVESGGGLVQPGGSLKLSCAASGFTFNKYAMNWVRQAPGKCLEWVARIRSKYNNYATYYADSVKDRFTISRDDSKNTAYLQMNNLKTEDTAVYYCVRHGNFGNSYISYWAYWGQGTLVTVSSGGGGSGGGGSGGGGSQTVVTQEPSLTVSPGGTVTLTCGSSTGAVTSGNYPNWVQQKPGQAPRGLIGGTKFLAPGTPARFSGSLLGGKAALTLSGVQPEDEAEYYCVLWYSNRWVFGCGTKLTVL

SEQ ID NO: 320 - protein, 1509 aa, Artificial Sequence
  Synthetic
QVQLVQSGAEVKKPGASVKVSCKASGYTFTGYYIHWVRQAPGQCLEWMGWINPNSGGTNYAQKFQGRVTMTRDTSISTAYMELSRLRSDDTAVYYCARVEAVAGREYYYFSGMDVWGQGTTVTVSSGGGGSGGGGSGGGGSSYELTQPPSVSVSPGQTASITCSGEKLGDKYVYWYQQKPGQSPVLVIYQSTKRPSGVPERFSGSNSGNTATLTISGTQAMDEADYYCQAYHASTAVFGCGTKLTVLSGGGGSEVQLVESGGGLVQPGGSLKLSCAASGFTFNKYAMNWVRQAPGKCLEWVARIRSKYNNYATYYADSVKDRFTISRDDSKNTAYLQMNNLKTEDTAVYYCVRHGNFGNSYISYWAYWGQGTLVTVSSGGGGSGGGGSGGGGSQTVVTQEPSLTVSPGGTVTLTCGSSTGAVTSGNYPNWVQQKPGQAPRGLIGGTKFLAPGTPARFSGSLLGGKAALTLSGVQPEDEAEYYCVLWYSNRWVFGCGTKLTVLGGGGSGGGGSGGGGSDKTHTCPPCPAPELLGGPSVFLFPPKPKDTLMISRTPEVTCVVVDVSHEDPEVKFNWYVDGVEVHNAKTKPCEEQYGSTYRCVSVLTVLHQDWLNGKEYKCKVSNKALPAPIEKTISKAKGQPREPQVYTLPPSREEMTKNQVSLTCLVKGFYPSDIAVEWESNGQPENNYKTTPPVLDSDGSFFLYSKLTVDKSRWQQGNVFSCSVMHEALHNHYTQKSLSLSPGKGGGGSGGGGSGGGGSGGGGSGGGGSGGGGSDKTHTCPPCPAPELLGGPSVFLFPPKPKDTLMISRTPEVTCVVVDVSHEDPEVKFNWYVDGVEVHNAKTKPCEEQYGSTYRCVSVLTVLHQDWLNGKEYKCKVSNKALPAPIEKTISKAKGQPREPQVYTLPPSREEMTKNQVSLTCLVKGFYPSDIAVEWESNGQPENNYKTTPPVLDSDGSFFLYSKLTVDKSRWQQGNVFSCSVMHEALHNHYTQKSLSLSPGKGGGGSGGGGSGGGGSEVQLLESGGGLVQPGGSLRLSCAASGFTFSSYWMHWVRQTPGKCLEWVSKIDPSDDYTNYNQKVKGRFTISIDKSKNTLYLQMNSLRAEDTAVYYCARWDYNYFDVWGQGTTVTVSSGGGGSGGGGSGGGGSEIVMTQSPATLSVSPGERATLTCRASSSVSYMHWYQQKPGQAPRLLIYGTSNLVSGVPARFSGSGSGTEFTLTISSLQSEDFAVYYCQQWSSYPLTFGCGTKVEIKSGGGGSEVQLVESGGGLVQPGGSLKLSCAASGFTFNKYAMNWVRQAPGKCLEWVARIRSKYNNYATYYADSVKDRFTISRDDSKNTAYLQMNNLKTEDTAVYYCVRHGNFGNSYISYWAYWGQGTLVTVSSGGGGSGGGGSGGGGSQTVVTQEPSLTVSPGGTVTLTCGSSTGAVTSGNYPNWVQQKPGQAPRGLIGGTKFLAPGTPARFSGSLLGGKAALTLSGVQPEDEAEYYCVLWYSNRWVFGCGTKLTVL

SEQ ID NO: 321 - protein, 1509 aa, Artificial Sequence
  Synthetic
QVQLVQSGAEVKKPGASVKVSCKASGYTFTGYYIHWVRQAPGQCLEWMGWINPNSGGTNYAQKFQGRVTMTRDTSISTAYMELSRLRSDDTAVYYCARVEAVAGREYYYFSGMDVWGQGTTVTVSSGGGGSGGGGSGGGGSSYELTQPPSVSVSPGQTASITCSGEKLGDKYVYWYQQKPGQSPVLVIYQSTKRPSGVPERFSGSNSGNTATLTISGTQAMDEADYYCQAYHASTAVFGCGTKLTVLSGGGGSEVQLVESGGGLVQPGGSLKLSCAASGFTFNKYAMNWVRQAPGKCLEWVARIRSKYNNYATYYADSVKDRFTISRDDSKNTAYLQMNNLKTEDTAVYYCVRHGNFGNSYISYWAYWGQGTLVTVSSGGGGSGGGGSGGGGSQTVVTQEPSLTVSPGGTVTLTCGSSTGAVTSGNYPNWVQQKPGQAPRGLIGGTKFLAPGTPARFSGSLLGGKAALTLSGVQPEDEAEYYCVLWYSNRWVFGCGTKLTVLGGGGSGGGGSGGGGSDKTHTCPPCPAPELLGGPSVFLFPPKPKDTLMISRTPEVTCVVVDVSHEDPEVKFNWYVDGVEVHNAKTKPCEEQYGSTYRCVSVLTVLHQDWLNGKEYKCKVSNKALPAPIEKTISKAKGQPREPQVYTLPPSREEMTKNQVSLTCLVKGFYPSDIAVEWESNGQPENNYKTTPPVLDSDGSFFLYSKLTVDKSRWQQGNVFSCSVMHEALHNHYTQKSLSLSPGKGGGGSGGGGSGGGGSGGGGSGGGGSGGGGSDKTHTCPPCPAPELLGGPSVFLFPPKPKDTLMISRTPEVTCVVVDVSHEDPEVKFNWYVDGVEVHNAKTKPCEEQYGSTYRCVSVLTVLHQDWLNGKEYKCKVSNKALPAPIEKTISKAKGQPREPQVYTLPPSREEMTKNQVSLTCLVKGFYPSDIAVEWESNGQPENNYKTTPPVLDSDGSFFLYSKLTVDKSRWQQGNVFSCSVMHEALHNHYTQKSLSLSPGKGGGGSGGGGSGGGGSEVQLLESGGGLVQPGGSVRLSCAASGFTFSSYWMYWVRQAPGKCLEWVSKIDPSDDYTNYNQKVKGRFTISIDNSKNTLYLQMNSLRAEDSAVYYCARWDYTHFDVWGQGTTVTVSSGGGGSGGGGSGGGGSEIVMTQSPATLSVSPGERATLSCRASSSVSYMHWYQQKPGQAPRLLIYGTSNLASGVPVRFSGSGSGTEFTLTISRLQSEDVAVYYCQQWSSYPLTFGCGTKVEIKSGGGGSEVQLVESGGGLVQPGGSLKLSCAASGFTFNKYAMNWVRQAPGKCLEWVARIRSKYNNYATYYADSVKDRFTISRDDSKNTAYLQMNNLKTEDTAVYYCVRHGNFGNSYISYWAYWGQGTLVTVSSGGGGSGGGGSGGGGSQTVVTQEPSLTVSPGGTVTLTCGSSTGAVTSGNYPNWVQQKPGQAPRGLIGGTKFLAPGTPARFSGSLLGGKAALTLSGVQPEDEAEYYCVLWYSNRWVFGCGTKLTVL

SEQ ID NO: 322 - protein, 1487 aa, Artificial Sequence
  Synthetic
QVQLVQSGAEVKKPGASVKVSCKASGYTFTGYYIHWVRQAPGQCLEWMGWINPNSGGTNYAQKFQGRVTMTRDTSISTAYMELSRLRSDDTAVYYCARVEAVAGREYYYFSGMDVWGQGTTVTVSSGGGGSGGGGSGGGGSSYELTQPPSVSVSPGQTASITCSGEKLGDKYVYWYQQKPGQSPVLVIYQSTKRPSGVPERFSGSNSGNTATLTISGTQAMDEADYYCQAYHASTAVFGCGTKLTVLSGGGGSEVQLVESGGGLVQPGGSLKLSCAASGFTFNKYAMNWVRQAPGKCLEWVARIRSKYNNYATYYADSVKDRFTISRDDSKNTAYLQMNNLKTEDTAVYYCVRHGNFGNSYISYWAYWGQGTLVTVSSGGGGSGGGGSGGGGSQTVVTQEPSLTVSPGGTVTLTCGSSTGAVTSGNYPNWVQQKPGQAPRGLIGGTKFLAPGTPARFSGSLLGGKAALTLSGVQPEDEAEYYCVLWYSNRWVFGCGTKLTVLGGGGDKTHTCPPCPAPELLGGPSVFLFPPKPKDTLMISRTPEVTCVVVDVSHEDPEVKFNWYVDGVEVHNAKTKPCEEQYGSTYRCVSVLTVLHQDWLNGKEYKCKVSNKALPAPIEKTISKAKGQPREPQVYTLPPSREEMTKNQVSLTCLVKGFYPSDIAVEWESNGQPENNYKTTPPVLDSDGSFFLYSKLTVDKSRWQQGNVFSCSVMHEALHNHYTQKSLSLSPGKGGGGSGGGGSGGGGSGGGGSGGGGSGGGGSDKTHTCPPCPAPELLGGPSVFLFPPKPKDTLMISRTPEVTCVVVDVSHEDPEVKFNWYVDGVEVHNAKTKPCEEQYGSTYRCVSVLTVLHQDWLNGKEYKCKVSNKALPAPIEKTISKAKGQPREPQVYTLPPSREEMTKNQVSLTCLVKGFYPSDIAVEWESNGQPENNYKTTPPVLDSDGSFFLYSKLTVDKSRWQQGNVFSCSVMHEALHNHYTQKSLSLSPGKGGGGEVQLLESGGGLVQPGGSLRLSCAASGFTFSSYWMHWVRQTPGKCLEWVSKIDPSDDYTNYNQKVKGRFTISIDKSKNTLYLQMNSLRAEDTAVYYCARWDYNYFDVWGQGTTVTVSSGGGGSGGGGSGGGGSEIVMTQSPATLSVSPGERATLTCRASSSVSYMHWYQQKPGQAPRLLIYGTSNLVSGVPARFSGSGSGTEFTLTISSLQSEDFAVYYCQQWSSYPLTFGCGTKVEIKSGGGGSEVQLVESGGGLVQPGGSLKLSCAASGFTFNKYAMNWVRQAPGKCLEWVARIRSKYNNYATYYADSVKDRFTISRDDSKNTAYLQMNNLKTEDTAVYYCVRHGNFGNSYISYWAYWGQGTLVTVSSGGGGSGGGGSGGGGSQTVVTQEPSLTVSPGGTVTLTCGSSTGAVTSGNYPNWVQQKPGQAPRGLIGGTKFLAPGTPARFSGSLLGGKAALTLSGVQPEDEAEYYCVLWYSNRWVFGCGTKLTVL

SEQ ID NO: 323 - protein, 1496 aa, Artificial Sequence
  Synthetic
QVQLQESGPGLVKPSETLSLTCTVSGGSISSSSYFWGWIRQPPGKCLEWIGNIYYSGSSNYNPSLKSRVTISVDTSKNQFSLKLSSVTAADTAVYYCARLPRGDRDAFDIWGQGTMVTVSSGGGGQGGGGQGGGGQDIVMTQSPSSLSASVGDRVTITCRASQGISNYLAWYQQKPGKVPKLLIYAASTLQSGVPSRFSGSGSGTDFTLTISSLQPEDFATYYCQQSYSTPFTFGCGTKVEIKSGGGGQEVQLVESGGGLVQPGGSLKLSCAASGFTFNKYAINWVREAPGKGLEWVARIRSKYNNYATYYADAVKDRFTISRDDSKNTAYLQMNNLKTEDTAVYYCVRNANFGTSYISYFAYWGQGTLVTVSSGGGGQGGGGQGGGGQQTVVTQEPSLTVSPGGTVTLTCGSSTGAVTSGNYPNWVQKKPGQAPRGLIGGTKFLAPGTPARFSGSLLGGKAALTLSGVQPEDEAEYYCVLWYSNRWVFGSGTKLTVLGGGGQGGGGQGGGGQCPPCPAPELLGGPSVFLFPPKPKDTLMISRTPEVTCVVVDVSHEEPEVKFNWYVDGVEVHNAKTKPCEEQYGSTYRCVSVLTVLHQDWLNGKEYKCKVSNKALPAPIEKTISKAKGQPREPQVYTLPPSREEMTKNQVSLTCLVKGFYPSDIAVEWESNGQPENNYKTTPPVLDSDGSFFLYSKLTVDKSRWQQGNVFSCSVMHEALHNHYTQKSLSLSPGKGGGGQGGGGQGGGGQGGGGQGGGGQGGGGQCPPCPAPELLGGPSVFLFPPKPKDTLMISRTPEVTCVVVDVSHEEPEVKFNWYVDGVEVHNAKTKPCEEQYGSTYRCVSVLTVLHQDWLNGKEYKCKVSNKALPAPIEKTISKAKGQPREPQVYTLPPSREEMTKNQVSLTCLVKGFYPSDIAVEWESNGQPENNYKTTPPVLDSDGSFFLYSKLTVDKSRWQQGNVFSCSVMHEALHNHYTQKSLSLSPGKGGGGQGGGGQGGGGQQVQLVQSGAEVKKPGASVKVSCKASGYTFTNYWMNWVRQAPGQCLEWMGNIHSKAHGTNYNQKFQGRVTMTVDTSSSTAYMELSRLRSDDTAVYYCATRYFYVMDYWGQGTLVTVSSGGGGQGGGGQGGGGQDIQMTQSPSSLSASVGDRVTITCRASQDISNYLNWYQQKPGKVPKLLIYYTSRLHSGVPSRFSGSGSGTDFTLTISSLQPEDVATYYCVQYAQFPLTFGCGTKVEIKSGGGGQEVQLVESGGGLVQPGGSLKLSCAASGFTFNKYAINWVREAPGKGLEWVARIRSKYNNYATYYADAVKDRFTISRDDSKNTAYLQMNNLKTEDTAVYYCVRNANFGTSYISYFAYWGQGTLVTVSSGGGGQGGGGQGGGGQQTVVTQEPSLTVSPGGTVTLTCGSSTGAVTSGNYPNWVQKKPGQAPRGLIGGTKFLAPGTPARFSGSLLGGKAALTLSGVQPEDEAEYYCVLWYSNRWVFGSGTKLTVL

SEQ ID NO: 324 - protein, 729 aa, Artificial Sequence
  Synthetic
DKTHTCPPCPAPELLGGPSVFLFPPKPKDTLMISRTPEVTCVVVDVSHEDPEVKFNWYVDGVEVHNAKTKPCEEQYGSTYRCVSVLTVLHQDWLNGKEYKCKVSNKALPAPIEKTISKAKGQPREPQVYTLPPSREEMTKNQVSLTCLVKGFYPSDIAVEWESNGQPENNYDTTPPVLDSDGSFFLYSDLTVDKSRWQQGNVFSCSVMHEALHNHYTQDSLSLSPGKGGGGQVQLQESGPGLVKPSETLSLTCTVSGGSISSSSYFWGWIRQPPGKCLEWIGNIYYSGSSNYNPSLKSRVTISVDTSKNQFSLKLSSVTAADTAVYYCARLPRGDRDAFDIWGQGTMVTVSSGGGGSGGGGSGGGGSDIVMTQSPSSLSASVGDRVTITCRASQGISNYLAWYQQKPGKVPKLLIYAASTLQSGVPSRFSGSGSGTDFTLTISSLQPEDFATYYCQQSYSTPFTFGCGTKVEIKSGGGGSEVQLVESGGGLVQPGGSLKLSCAASGFTFNKYAMNWVRQAPGKGMEWVARIRSKYNNYATYYADAVKDRFTISRDDSKNTLYLQMNNLKTEDTAVYYCVRAGNFGSSYISYFAYWGQGTLVTVSSGGGGSGGGGSGGGGSQTVVTQEPSLTVSPGGTVTITCGSSTGAVTSGNYPNWIQKKPGQAPRGLIGGTKFLAPGTPARFSGSLEGGKAALTLSGVQPEDEAEYYCVLYYSNRWVFGSGTKLTVL

SEQ ID NO: 325 - protein, 725 aa, Artificial Sequence
  Synthetic
QVQLVQSGAEVKKPGASVKVSCKASGYTFTNYWMNWVRQAPGQCLEWMGNIAYGVKGTNYNQKFQGRVTMTVDTSSSTAYMELSRLRSDDTAVYYCATRYFYVMDYWGQGTLVTVSSGGGGSGGGGSGGGGSDIQMTQSPSSLSASVGDRVTITCRASQDISNYLNWYQQKPGKVPKLLIYYTSRLHSGVPSRFSGSGSGTDFTLTISSLQPEDVATYYCVQYAQFPLTFGCGTKVEIKSGGGGSEVQLVESGGGLVQPGGSLKLSCAASGFTFNKYAMNWVRQAPGKGMEWVARIRSKYNNYATYYADAVKDRFTISRDDSKNTLYLQMNNLKTEDTAVYYCVRAGNFGSSYISYFAYWGQGTLVTVSSGGGGSGGGGSGGGGSQTVVTQEPSLTVSPGGTVTITCGSSTGAVTSGNYPNWIQKKPGQAPRGLIGGTKFLAPGTPARFSGSLEGGKAALTLSGVQPEDEAEYYCVLYYSNRWVFGSGTKLTVLGGGGDKTHTCPPCPAPELLGGPSVFLFPPKPKDTLMISRTPEVTCVVVDVSHEDPEVKFNWYVDGVEVHNAKTKPCEEQYGSTYRCVSVLTVLHQDWLNGKEYKCKVSNKALPAPIEKTISKAKGQPREPQVYTLPPSRKEMTKNQVSLTCLVKGFYPSDIAVEWESNGQPENNYKTTPPVLKSDGSFFLYSKLTVDKSRWQQGNVFSCSVMHEALHNHYTQKSLSLSPGK

SEQ ID NO: 326 - protein, 725 aa, Artificial Sequence
  Synthetic
DKTHTCPPCPAPELLGGPSVFLFPPKPKDTLMISRTPEVTCVVVDVSHEDPEVKFNWYVDGVEVHNAKTKPCEEQYGSTYRCVSVLTVLHQDWLNGKEYKCKVSNKALPAPIEKTISKAKGQPREPQVYTLPPSRKEMTKNQVSLTCLVKGFYPSDIAVEWESNGQPENNYKTTPPVLKSDGSFFLYSKLTVDKSRWQQGNVFSCSVMHEALHNHYTQKSLSLSPGKGGGGQVQLVQSGAEVKKPGASVKVSCKASGYTFTNYWMNWVRQAPGQCLEWMGNIAYGVKGTNYNQKFQGRVTMTVDTSSSTAYMELSRLRSDDTAVYYCATRYFYVMDYWGQGTLVTVSSGGGGSGGGGSGGGGSDIQMTQSPSSLSASVGDRVTITCRASQDISNYLNWYQQKPGKVPKLLIYYTSRLHSGVPSRFSGSGSGTDFTLTISSLQPEDVATYYCVQYAQFPLTFGCGTKVEIKSGGGGSEVQLVESGGGLVQPGGSLKLSCAASGFTFNKYAMNWVRQAPGKGMEWVARIRSKYNNYATYYADAVKDRFTISRDDSKNTLYLQMNNLKTEDTAVYYCVRAGNFGSSYISYFAYWGQGTLVTVSSGGGGSGGGGSGGGGSQTVVTQEPSLTVSPGGTVTITCGSSTGAVTSGNYPNWIQKKPGQAPRGLIGGTKFLAPGTPARFSGSLEGGKAALTLSGVQPEDEAEYYCVLYYSNRWVFGSGTKLTVL

SEQ ID NO: 327 - protein, 729 aa, Artificial Sequence
  Synthetic
QVQLQESGPGLVKPSETLSLTCTVSGGSISSSSYFWGWIRQPPGKCLEWIGNIYYSGSSNYNPSLKSRVTISVDTSKNQFSLKLSSVTAADTAVYYCARLPRGDRDAFDIWGQGTMVTVSSGGGGSGGGGSGGGGSDIVMTQSPSSLSASVGDRVTITCRASQGISNYLAWYQQKPGKVPKLLIYAASTLQSGVPSRFSGSGSGTDFTLTISSLQPEDFATYYCQQSYSTPFTFGCGTKVEIKSGGGGSEVQLVESGGGLVQPGGSLKLSCAASGFTFNKYAMNWVRQAPGKGMEWVARIRSKYNNYATYYADAVKDRFTISRDDSKNTLYLQMNNLKTEDTAVYYCVRAGNFGSSYISYFAYWGQGTLVTVSSGGGGSGGGGSGGGGSQTVVTQEPSLTVSPGGTVTITCGSSTGAVTSGNYPNWIQKKPGQAPRGLIGGTKFLAPGTPARFSGSLEGGKAALTLSGVQPEDEAEYYCVLYYSNRWVFGSGTKLTVLGGGGDKTHTCPPCPAPELLGGPSVFLFPPKPKDTLMISRTPEVTCVVVDVSHEDPEVKFNWYVDGVEVHNAKTKPCEEQYGSTYRCVSVLTVLHQDWLNGKEYKCKVSNKALPAPIEKTISKAKGQPREPQVYTLPPSREEMTKNQVSLTCLVKGFYPSDIAVEWESNGQPENNYDTTPPVLDSDGSFFLYSDLTVDKSRWQQGNVFSCSVMHEALHNHYTQDSLSLSPGK

SEQ ID NO: 328 - protein, 785 aa, Artificial Sequence
  Synthetic
QVQLQESGPGLVKPSETLSLTCTVSGGSISSSSYFWGWIRQPPGKCLEWIGNIYYSGSSNYNPSLKSRVTISVDTSKNQFSLKLSSVTAADTAVYYCARLPRGDRDAFDIWGQGTMVTVSSGGGGSGGGGSGGGGSGGGGSEVQLVESGGGLVQPGGSLKLSCAASGFTFNKYAMNWVRQAPGKGMEWVARIRSKYNNYATYYADAVKDRFTISRDDSKNTLYLQMNNLKTEDTAVYYCVRAGNFGSSYISYFAYWGQGTLVTVSSGGGGSGGGGSGGGGSDKTHTCPPCPAPELLGGPSVFLFPPKPKDTLMISRTPEVTCVVVDVSHEDPEVKFNWYVDGVEVHNAKTKPCEEQYGSTYRCVSVLTVLHQDWLNGKEYKCKVSNKALPAPIEKTISKAKGQPREPQVYTLPPSREEMTKNQVSLTCLVKGFYPSDIAVEWESNGQPENNYDTTPPVLDSDGSFFLYSDLTVDKSRWQQGNVFSCSVMHEALHNHYTQDSLSLSPGKGGGGSGGGGSGGGGSQVQLVQSGAEVKKPGASVKVSCKASGYTFTNYWMNWVRQAPGQCLEWMGNIAYGVKGTNYNQKFQGRVTMTVDTSSSTAYMELSRLRSDDTAVYYCATRYFYVMDYWGQGTLVTVSSGGGGSGGGGSGGGGSGGGGSEVQLVESGGGLVQPGGSLKLSCAASGFTFNKYAMNWVRQAPGKGMEWVARIRSKYNNYATYYADAVKDRFTISRDDSKNTLYLQMNNLKTEDTAVYYCVRAGNFGSSYISYFAYWGQGTLVTVSS

SEQ ID NO: 329 - protein, 731 aa, Artificial Sequence
  Synthetic
DIVMTQSPSSLSASVGDRVTITCRASQGISNYLAWYQQKPGKVPKLLIYAASTLQSGVPSRFSGSGSGTDFTLTISSLQPEDFATYYCQQSYSTPFTFGCGTKVEIKSGGGGSGGGGSGGGGSGGGGSQTVVTQEPSLTVSPGGTVTITCGSSTGAVTSGNYPNWIQKKPGQAPRGLIGGTKFLAPGTPARFSGSLEGGKAALTLSGVQPEDEAEYYCVLYYSNRWVFGSGTKLTVLGGGGSGGGGSGGGGSDKTHTCPPCPAPELLGGPSVFLFPPKPKDTLMISRTPEVTCVVVDVSHEDPEVKFNWYVDGVEVHNAKTKPCEEQYGSTYRCVSVLTVLHQDWLNGKEYKCKVSNKALPAPIEKTISKAKGQPREPQVYTLPPSRKEMTKNQVSLTCLVKGFYPSDIAVEWESNGQPENNYKTTPPVLKSDGSFFLYSKLTVDKSRWQQGNVFSCSVMHEALHNHYTQKSLSLSPGKGGGGSGGGGSGGGGSDIQMTQSPSSLSASVGDRVTITCRASQDISNYLNWYQQKPGKVPKLLIYYTSRLHSGVPSRFSGSGSGTDFTLTISSLQPEDVATYYCVQYAQFPLTFGCGTKVEIKSGGGGSGGGGSGGGGSGGGGSQTVVTQEPSLTVSPGGTVTITCGSSTGAVTSGNYPNWIQKKPGQAPRGLIGGTKFLAPGTPARFSGSLEGGKAALTLSGVQPEDEAEYYCVLYYSNRWVFGSGTKLTVL

SEQ ID NO: 330 - protein, 10 aa, Artificial Sequence
  Synthetic
DKTHTCPPCP

SEQ ID NO: 331 - protein, 12 aa, Artificial Sequence
  Synthetic
ERKCCVECPPCP

SEQ ID NO: 332 - protein, 16 aa, Artificial Sequence
  Synthetic
ELKTPLDTTHTCPRCP

SEQ ID NO: 333 - protein, 17 aa, Artificial Sequence
  Synthetic
ELKTPLGDTTHTCPRCP

SEQ ID NO: 334 - protein, 5 aa, Artificial Sequence
  Synthetic
NYWLG

SEQ ID NO: 335 - protein, 17 aa, Artificial Sequence
  Synthetic
DIFPGSGNIHYNEKFKG

SEQ ID NO: 336 - protein, 10 aa, Artificial Sequence
  Synthetic
LRNWDEPMDY

SEQ ID NO: 337 - protein, 17 aa, Artificial Sequence
  Synthetic
KSSQSLLNSGNQKNYLT

SEQ ID NO: 338 - protein, 7 aa, Artificial Sequence
  Synthetic
WASTRES

SEQ ID NO: 339 - protein, 9 aa, Artificial Sequence
  Synthetic
QNDYSYPLT

SEQ ID NO: 340 - protein, 120 aa, Artificial Sequence
  Synthetic
EVQLLEQSGAELVRPGTSVKISCKASGYAFTNYWLGWVKQRPGHGLEWIGDIFPGSGNIHYNEKFKGKATLTADKSSSTAYMQLSSLTFEDSAVYFCARLRNWDEPMDYWGQGTTVTVSS

SEQ ID NO: 341 - protein, 113 aa, Artificial Sequence
  Synthetic
ELVMTQSPSSLTVTAGEKVTMSCKSSQSLLNSGNQKNYLTWYQQKPGQPPKLLIYWASTRESGVPDRFTGSGSGTDFTLTISSVQAEDLAVYYCQNDYSYPLTFGAGTKLEIK

SEQ ID NO: 342 - protein, 1513 aa, Artificial Sequence
  Synthetic
ELVMTQSPSSLTVTAGEKVTMSCKSSQSLLNSGNQKNYLTWYQQKPGQPPKLLIYWASTRESGVPDRFTGSGSGTDFTLTISSVQAEDLAVYYCQNDYSYPLTFGAGTKLEIKGGGGSGGGGSGGGGSEVQLLEQSGAELVRPGTSVKISCKASGYAFTNYWLGWVKQRPGHGLEWIGDIFPGSGNIHYNEKFKGKATLTADKSSSTAYMQLSSLTFEDSAVYFCARLRNWDEPMDYWGQGTTVTVSSGGGGDKTHTCPPCPAPELLGGPSVFLFPPKPKDTLMISRTPEVTCVVVDVSHEDPEVKFNWYVDGVEVHNAKTKPCEEQYGSTYRCVSVLTVLHQDWLNGKEYKCKVSNKALPAPIEKTISKAKGQPREPQVYTLPPSREEMTKNQVSLTCLVKGFYPSDIAVEWESNGQPENNYKTTPPVLDSDGSFFLYSKLTVDKSRWQQGNVFSCSVMHEALHNHYTQKSLSLSPGKGGGGSGGGGSGGGGSGGGGSGGGGSGGGGSDKTHTCPPCPAPELLGGPSVFLFPPKPKDTLMISRTPEVTCVVVDVSHEDPEVKFNWYVDGVEVHNAKTKPCEEQYGSTYRCVSVLTVLHQDWLNGKEYKCKVSNKALPAPIEKTISKAKGQPREPQVYTLPPSREEMTKNQVSLTCLVKGFYPSDIAVEWESNGQPENNYKTTPPVLDSDGSFFLYSKLTVDKSRWQQGNVFSCSVMHEALHNHYTQKSLSLSPGKGGGGEVQLLESGGGVVQPGRSLRLSCAASGFTFSSYGMGWVRQAPGKGLEWVAVISYDGSNKYYADSVKGRFTISRDNSKNTLYLQMNSLRAEDTAVYYCAREGAHFGSGSYYPLYYYYAMDVWGQGTTVTVSSGGGGSGGGGSGGGGSELTLTQSPGTLSLSPGERATLSCRASQSVSSSYLAWYQQKPGQAPRLLIYGASIRATGIPDRFSGSGSGTDFTLTISRLEPEDFAVYYCQQYGSSPIFTFGPGTKVEIKSGGGGSEVQLVESGGGLVQPGGSLKLSCAASGFTFNKYAMNWVRQAPGKCLEWVARIRSKYNNYATYYADSVKDRFTISRDDSKNTAYLQMNNLKTEDTAVYYCVRHGNFGNSYISYWAYWGQGTLVTVSSGGGGSGGGGSGGGGSQTVVTQEPSLTVSPGGTVTLTCGSSTGAVTSGNYPNWVQQKPGQAPRGLIGGTKFLAPGTPARFSGSLLGGKAALTLSGVQPEDEAEYYCVLWYSNRWVFGCGTKLTVLGGGGSGGGGSGGGGSEVQLVESGGGLVQPGGSLKLSCAASGFTFNKYAMNWVRQAPGKCLEWVARIRSKYNNYATYYADSVKDRFTISRDDSKNTAYLQMNNLKTEDTAVYYCVRHGNFGNSYISYWAYWGQGTLVTVSSGGGGSGGGGSGGGGSQTVVTQEPSLTVSPGGTVTLTCGSSTGAVTSGNYPNWVQQKPGQAPRGLIGGTKFLAPGTPARFSGSLLGGKAALTLSGVQPEDEAEYYCVLWYSNRWVFGCGTKLTVL

SEQ ID NO: 343 - protein, 1513 aa, Artificial Sequence
  Synthetic
ELVMTQSPSSLTVTAGEKVTMSCKSSQSLLNSGNQKNYLTWYQQKPGQPPKLLIYWASTRESGVPDRFTGSGSGTDFTLTISSVQAEDLAVYYCQNDYSYPLTFGAGTKLEIKGGGGSGGGGSGGGGSEVQLLEQSGAELVRPGTSVKISCKASGYAFTNYWLGWVKQRPGHGLEWIGDIFPGSGNIHYNEKFKGKATLTADKSSSTAYMQLSSLTFEDSAVYFCARLRNWDEPMDYWGQGTTVTVSSGGGGSEVQLLESGGGVVQPGRSLRLSCAASGFTFSSYGMGWVRQAPGKGLEWVAVISYDGSNKYYADSVKGRFTISRDNSKNTLYLQMNSLRAEDTAVYYCAREGAHFGSGSYYPLYYYYAMDVWGQGTTVTVSSGGGGSGGGGSGGGGSELTLTQSPGTLSLSPGERATLSCRASQSVSSSYLAWYQQKPGQAPRLLIYGASIRATGIPDRFSGSGSGTDFTLTISRLEPEDFAVYYCQQYGSSPIFTFGPGTKVEIKSGGGGDKTHTCPPCPAPELLGGPSVFLFPPKPKDTLMISRTPEVTCVVVDVSHEDPEVKFNWYVDGVEVHNAKTKPCEEQYGSTYRCVSVLTVLHQDWLNGKEYKCKVSNKALPAPIEKTISKAKGQPREPQVYTLPPSREEMTKNQVSLTCLVKGFYPSDIAVEWESNGQPENNYKTTPPVLDSDGSFFLYSKLTVDKSRWQQGNVFSCSVMHEALHNHYTQKSLSLSPGKGGGGSGGGGSGGGGSGGGGSGGGGSGGGGSDKTHTCPPCPAPELLGGPSVFLFPPKPKDTLMISRTPEVTCVVVDVSHEDPEVKFNWYVDGVEVHNAKTKPCEEQYGSTYRCVSVLTVLHQDWLNGKEYKCKVSNKALPAPIEKTISKAKGQPREPQVYTLPPSREEMTKNQVSLTCLVKGFYPSDIAVEWESNGQPENNYKTTPPVLDSDGSFFLYSKLTVDKSRWQQGNVFSCSVMHEALHNHYTQKSLSLSPGKGGGGEVQLVESGGGLVQPGGSLKLSCAASGFTFNKYAMNWVRQAPGKCLEWVARIRSKYNNYATYYADSVKDRFTISRDDSKNTAYLQMNNLKTEDTAVYYCVRHGNFGNSYISYWAYWGQGTLVTVSSGGGGSGGGGSGGGGSQTVVTQEPSLTVSPGGTVTLTCGSSTGAVTSGNYPNWVQQKPGQAPRGLIGGTKFLAPGTPARFSGSLLGGKAALTLSGVQPEDEAEYYCVLWYSNRWVFGCGTKLTVLGGGGSGGGGSGGGGSEVQLVESGGGLVQPGGSLKLSCAASGFTFNKYAMNWVRQAPGKCLEWVARIRSKYNNYATYYADSVKDRFTISRDDSKNTAYLQMNNLKTEDTAVYYCVRHGNFGNSYISYWAYWGQGTLVTVSSGGGGSGGGGSGGGGSQTVVTQEPSLTVSPGGTVTLTCGSSTGAVTSGNYPNWVQQKPGQAPRGLIGGTKFLAPGTPARFSGSLLGGKAALTLSGVQPEDEAEYYCVLWYSNRWVFGCGTKLTVL

SEQ ID NO: 344 - protein, 1503 aa, Artificial Sequence
  Synthetic
ELVMTQSPSSLTVTAGEKVTMSCKSSQSLLNSGNQKNYLTWYQQKPGQPPKLLIYWASTRESGVPDRFTGSGSGTDFTLTISSVQAEDLAVYYCQNDYSYPLTFGAGTKLEIKGGGGSGGGGSGGGGSEVQLLEQSGAELVRPGTSVKISCKASGYAFTNYWLGWVKQRPGHGLEWIGDIFPGSGNIHYNEKFKGKATLTADKSSSTAYMQLSSLTFEDSAVYFCARLRNWDEPMDYWGQGTTVTVSSGGGGSEVQLLESGGGVVQPGRSLRLSCAASGFTFSSYGMGWVRQAPGKGLEWVAVISYDGSNKYYADSVKGRFTISRDNSKNTLYLQMNSLRAEDTAVYYCAREGAHFGSGSYYPLYYYYAMDVWGQGTTVTVSSGGGGSGGGGSGGGGSELTLTQSPGTLSLSPGERATLSCRASQSVSSSYLAWYQQKPGQAPRLLIYGASIRATGIPDRFSGSGSGTDFTLTISRLEPEDFAVYYCQQYGSSPIFTFGPGTKVEIKSGGGGSEVQLVESGGGLVQPGGSLKLSCAASGFTFNKYAMNWVRQAPGKCLEWVARIRSKYNNYATYYADSVKDRFTISRDDSKNTAYLQMNNLKTEDTAVYYCVRHGNFGNSYISYWAYWGQGTLVTVSSGGGGSGGGGSGGGGSQTVVTQEPSLTVSPGGTVTLTCGSSTGAVTSGNYPNWVQQKPGQAPRGLIGGTKFLAPGTPARFSGSLLGGKAALTLSGVQPEDEAEYYCVLWYSNRWVFGCGTKLTVLGGGGDKTHTCPPCPAPELLGGPSVFLFPPKPKDTLMISRTPEVTCVVVDVSHEDPEVKFNWYVDGVEVHNAKTKPCEEQYGSTYRCVSVLTVLHQDWLNGKEYKCKVSNKALPAPIEKTISKAKGQPREPQVYTLPPSREEMTKNQVSLTCLVKGFYPSDIAVEWESNGQPENNYKTTPPVLDSDGSFFLYSKLTVDKSRWQQGNVFSCSVMHEALHNHYTQKSLSLSPGKGGGGSGGGGSGGGGSGGGGSGGGGSGGGGSDKTHTCPPCPAPELLGGPSVFLFPPKPKDTLMISRTPEVTCVVVDVSHEDPEVKFNWYVDGVEVHNAKTKPCEEQYGSTYRCVSVLTVLHQDWLNGKEYKCKVSNKALPAPIEKTISKAKGQPREPQVYTLPPSREEMTKNQVSLTCLVKGFYPSDIAVEWESNGQPENNYKTTPPVLDSDGSFFLYSKLTVDKSRWQQGNVFSCSVMHEALHNHYTQKSLSLSPGKGGGGEVQLVESGGGLVQPGGSLKLSCAASGFTFNKYAMNWVRQAPGKCLEWVARIRSKYNNYATYYADSVKDRFTISRDDSKNTAYLQMNNLKTEDTAVYYCVRHGNFGNSYISYWAYWGQGTLVTVSSGGGGSGGGGSGGGGSQTVVTQEPSLTVSPGGTVTLTCGSSTGAVTSGNYPNWVQQKPGQAPRGLIGGTKFLAPGTPARFSGSLLGGKAALTLSGVQPEDEAEYYCVLWYSNRWVFGCGTKLTVL

SEQ ID NO: 345 - protein, 1514 aa, Artificial Sequence
  Synthetic
ELVMTQSPSSLTVTAGEKVTMSCKSSQSLLNSGNQKNYLTWYQQKPGQPPKLLIYWASTRESGVPDRFTGSGSGTDFTLTISSVQAEDLAVYYCQNDYSYPLTFGAGTKLEIKGGGGSGGGGSGGGGSEVQLLEQSGAELVRPGTSVKISCKASGYAFTNYWLGWVKQRPGHGLEWIGDIFPGSGNIHYNEKFKGKATLTADKSSSTAYMQLSSLTFEDSAVYFCARLRNWDEPMDYWGQGTTVTVSSGGGGSEVQLLESGGGVVQPGRSLRLSCAASGFTFSSYGMGWVRQAPGKGLEWVAVISYDGSNKYYADSVKGRFTISRDNSKNTLYLQMNSLRAEDTAVYYCAREGAHFGSGSYYPLYYYYAMDVWGQGTTVTVSSGGGGSGGGGSGGGGSELTLTQSPGTLSLSPGERATLSCRASQSVSSSYLAWYQQKPGQAPRLLIYGASIRATGIPDRFSGSGSGTDFTLTISRLEPEDFAVYYCQQYGSSPIFTFGPGTKVEIKSGGGGSEVQLVESGGGLVQPGGSLKLSCAASGFTFNKYAMNWVRQAPGKCLEWVARIRSKYNNYATYYADSVKDRFTISRDDSKNTAYLQMNNLKTEDTAVYYCVRHGNFGNSYISYWAYWGQGTLVTVSSGGGGSGGGGSGGGGSQTVVTQEPSLTVSPGGTVTLTCGSSTGAVTSGNYPNWVQQKPGQAPRGLIGGTKFLAPGTPARFSGSLLGGKAALTLSGVQPEDEAEYYCVLWYSNRWVFGCGTKLTVLGGGGSGGGGSGGGGSEVQLVESGGGLVQPGGSLKLSCAASGFTFNKYAMNWVRQAPGKCLEWVARIRSKYNNYATYYADSVKDRFTISRDDSKNTAYLQMNNLKTEDTAVYYCVRHGNFGNSYISYWAYWGQGTLVTVSSGGGGSGGGGSGGGGSQTVVTQEPSLTVSPGGTVTLTCGSSTGAVTSGNYPNWVQQKPGQAPRGLIGGTKFLAPGTPARFSGSLLGGKAALTLSGVQPEDEAEYYCVLWYSNRWVFGCGTKLTVLGGGGDKTHTCPPCPAPELLGGPSVFLFPPKPKDTLMISRTPEVTCVVVDVSHEDPEVKFNWYVDGVEVHNAKTKPCEEQYGSTYRCVSVLTVLHQDWLNGKEYKCKVSNKALPAPIEKTISKAKGQPREPQVYTLPPSREEMTKNQVSLTCLVKGFYPSDIAVEWESNGQPENNYKTTPPVLDSDGSFFLYSKLTVDKSRWQQGNVFSCSVMHEALHNHYTQKSLSLSPGKGGGGSGGGGSGGGGSGGGGSGGGGSGGGGSDKTHTCPPCPAPELLGGPSVFLFPPKPKDTLMISRTPEVTCVVVDVSHEDPEVKFNWYVDGVEVHNAKTKPCEEQYGSTYRCVSVLTVLHQDWLNGKEYKCKVSNKALPAPIEKTISKAKGQPREPQVYTLPPSREEMTKNQVSLTCLVKGFYPSDIAVEWESNGQPENNYKTTPPVLDSDGSFFLYSKLTVDKSRWQQGNVFSCSVMHEALHNHYTQKSLSLSPGK

SEQ ID NO: 346 - protein, 1524 aa, Artificial Sequence
  Synthetic
ELVMTQSPSSLTVTAGEKVTMSCKSSQSLLNSGNQKNYLTWYQQKPGQPPKLLIYWASTRESGVPDRFTGSGSGTDFTLTISSVQAEDLAVYYCQNDYSYPLTFGAGTKLEIKGGGGSGGGGSGGGGSEVQLLEQSGAELVRPGTSVKISCKASGYAFTNYWLGWVKQRPGHGLEWIGDIFPGSGNIHYNEKFKGKATLTADKSSSTAYMQLSSLTFEDSAVYFCARLRNWDEPMDYWGQGTTVTVSSGGGGSEVQLVESGGGLVQPGGSLKLSCAASGFTFNKYAMNWVRQAPGKGLEWVARIRSKYNNYATYYADSVKDRFTISRDDSKNTAYLQMNNLKTEDTAVYYCVRHGNFGNSYISYWAYWGQGTLVTVSSGGGGSGGGGSGGGGSQTVVTQEPSLTVSPGGTVTLTCGSSTGAVTSGNYPNWVQQKPGQAPRGLIGGTKFLAPGTPARFSGSLLGGKAALTLSGVQPEDEAEYYCVLWYSNRWVFGGGTKLTVLGGGGSGGGGSGGGGSDKTHTCPPCPAPELLGGPSVFLFPPKPKDTLMISRTPEVTCVVVDVSHEDPEVKFNWYVDGVEVHNAKTKPCEEQYGSTYRCVSVLTVLHQDWLNGKEYKCKVSNKALPAPIEKTISKAKGQPREPQVYTLPPSREEMTKNQVSLTCLVKGFYPSDIAVEWESNGQPENNYKTTPPVLDSDGSFFLYSKLTVDKSRWQQGNVFSCSVMHEALHNHYTQKSLSLSPGKGGGGSGGGGSGGGGSGGGGSGGGGSGGGGSDKTHTCPPCPAPELLGGPSVFLFPPKPKDTLMISRTPEVTCVVVDVSHEDPEVKFNWYVDGVEVHNAKTKPCEEQYGSTYRCVSVLTVLHQDWLNGKEYKCKVSNKALPAPIEKTISKAKGQPREPQVYTLPPSREEMTKNQVSLTCLVKGFYPSDIAVEWESNGQPENNYKTTPPVLDSDGSFFLYSKLTVDKSRWQQGNVFSCSVMHEALHNHYTQKSLSLSPGKGGGGSGGGGSGGGGSEVQLVESGGGLVQPGGSLKLSCAASGFTFNKYAMNWVRQAPGKGLEWVARIRSKYNNYATYYADSVKDRFTISRDDSKNTAYLQMNNLKTEDTAVYYCVRHGNFGNSYISYWAYWGQGTLVTVSSGGGGSGGGGSGGGGSQTVVTQEPSLTVSPGGTVTLTCGSSTGAVTSGNYPNWVQQKPGQAPRGLIGGTKFLAPGTPARFSGSLLGGKAALTLSGVQPEDEAEYYCVLWYSNRWVFGGGTKLTVLGGGGSEVQLLESGGGVVQPGRSLRLSCAASGFTFSSYGMGWVRQAPGKGLEWVAVISYDGSNKYYADSVKGRFTISRDNSKNTLYLQMNSLRAEDTAVYYCAREGAHFGSGSYYPLYYYYAMDVWGQGTTVTVSSGGGGSGGGGSGGGGSELTLTQSPGTLSLSPGERATLSCRASQSVSSSYLAWYQQKPGQAPRLLIYGASIRATGIPDRFSGSGSGTDFTLTISRLEPEDFAVYYCQQYGSSPIFTFGPGTKVEIK

SEQ ID NO: 347 - protein, 1016 aa, Artificial Sequence
  Synthetic
ELVMTQSPSSLTVTAGEKVTMSCKSSQSLLNSGNQKNYLTWYQQKPGQPPKLLIYWASTRESGVPDRFTGSGSGTDFTLTISSVQAEDLAVYYCQNDYSYPLTFGAGTKLEIKGGGGSGGGGSGGGGSEVQLLEQSGAELVRPGTSVKISCKASGYAFTNYWLGWVKQRPGHGLEWIGDIFPGSGNIHYNEKFKGKATLTADKSSSTAYMQLSSLTFEDSAVYFCARLRNWDEPMDYWGQGTTVTVSSGGGGSEVQLVESGGGLVQPGGSLKLSCAASGFTFNKYAMNWVRQAPGKCLEWVARIRSKYNNYATYYADSVKDRFTISRDDSKNTAYLQMNNLKTEDTAVYYCVRHGNFGNSYISYWAYWGQGTLVTVSSGGGGSGGGGSGGGGSQTVVTQEPSLTVSPGGTVTLTCGSSTGAVTSGNYPNWVQQKPGQAPRGLIGGTKFLAPGTPARFSGSLLGGKAALTLSGVQPEDEAEYYCVLWYSNRWVFGCGTKLTVLGGGGSEVQLLESGGGVVQPGRSLRLSCAASGFTFSSYGMGWVRQAPGKGLEWVAVISYDGSNKYYADSVKGRFTISRDNSKNTLYLQMNSLRAEDTAVYYCAREGAHFGSGSYYPLYYYYAMDVWGQGTTVTVSSGGGGSGGGGSGGGGSELTLTQSPGTLSLSPGERATLSCRASQSVSSSYLAWYQQKPGQAPRLLIYGASIRATGIPDRFSGSGSGTDFTLTISRLEPEDFAVYYCQQYGSSPIFTFGPGTKVEIKSGGGGSEVQLVESGGGLVQPGGSLKLSCAASGFTFNKYAMNWVRQAPGKCLEWVARIRSKYNNYATYYADSVKDRFTISRDDSKNTAYLQMNNLKTEDTAVYYCVRHGNFGNSYISYWAYWGQGTLVTVSSGGGGSGGGGSGGGGSQTVVTQEPSLTVSPGGTVTLTCGSSTGAVTSGNYPNWVQQKPGQAPRGLIGGTKFLAPGTPARFSGSLLGGKAALTLSGVQPEDEAEYYCVLWYSNRWVFGCGTKLTVL

SEQ ID NO: 348 - protein, 1525 aa, Artificial Sequence
  Synthetic
ELVMTQSPSSLTVTAGEKVTMSCKSSQSLLNSGNQKNYLTWYQQKPGQPPKLLIYWASTRESGVPDRFTGSGSGTDFTLTISSVQAEDLAVYYCQNDYSYPLTFGAGTKLEIKGGGGSGGGGSGGGGSEVQLLEQSGAELVRPGTSVKISCKASGYAFTNYWLGWVKQRPGHGLEWIGDIFPGSGNIHYNEKFKGKATLTADKSSSTAYMQLSSLTFEDSAVYFCARLRNWDEPMDYWGQGTTVTVSSGGGGSEVQLVESGGGLVQPGGSLKLSCAASGFTFNKYAMNWVRQAPGKCLEWVARIRSKYNNYATYYADSVKDRFTISRDDSKNTAYLQMNNLKTEDTAVYYCVRHGNFGNSYISYWAYWGQGTLVTVSSGGGGSGGGGSGGGGSQTVVTQEPSLTVSPGGTVTLTCGSSTGAVTSGNYPNWVQQKPGQAPRGLIGGTKFLAPGTPARFSGSLLGGKAALTLSGVQPEDEAEYYCVLWYSNRWVFGCGTKLTVLGGGGSGGGGSGGGGSDKTHTCPPCPAPELLGGPSVFLFPPKPKDTLMISRTPEVTCVVVDVSHEDPEVKFNWYVDGVEVHNAKTKPCEEQYGSTYRCVSVLTVLHQDWLNGKEYKCKVSNKALPAPIEKTISKAKGQPREPQVYTLPPSREEMTKNQVSLTCLVKGFYPSDIAVEWESNGQPENNYKTTPPVLDSDGSFFLYSKLTVDKSRWQQGNVFSCSVMHEALHNHYTQKSLSLSPGKGGGGSGGGGSGGGGSGGGGSGGGGSGGGGSDKTHTCPPCPAPELLGGPSVFLFPPKPKDTLMISRTPEVTCVVVDVSHEDPEVKFNWYVDGVEVHNAKTKPCEEQYGSTYRCVSVLTVLHQDWLNGKEYKCKVSNKALPAPIEKTISKAKGQPREPQVYTLPPSREEMTKNQVSLTCLVKGFYPSDIAVEWESNGQPENNYKTTPPVLDSDGSFFLYSKLTVDKSRWQQGNVFSCSVMHEALHNHYTQKSLSLSPGKGGGGSGGGGSGGGGSEVQLLESGGGVVQPGRSLRLSCAASGFTFSSYGMGWVRQAPGKGLEWVAVISYDGSNKYYADSVKGRFTISRDNSKNTLYLQMNSLRAEDTAVYYCAREGAHFGSGSYYPLYYYYAMDVWGQGTTVTVSSGGGGSGGGGSGGGGSELTLTQSPGTLSLSPGERATLSCRASQSVSSSYLAWYQQKPGQAPRLLIYGASIRATGIPDRFSGSGSGTDFTLTISRLEPEDFAVYYCQQYGSSPIFTFGPGTKVEIKSGGGGSEVQLVESGGGLVQPGGSLKLSCAASGFTFNKYAMNWVRQAPGKCLEWVARIRSKYNNYATYYADSVKDRFTISRDDSKNTAYLQMNNLKTEDTAVYYCVRHGNFGNSYISYWAYWGQGTLVTVSSGGGGSGGGGSGGGGSQTVVTQEPSLTVSPGGTVTLTCGSSTGAVTSGNYPNWVQQKPGQAPRGLIGGTKFLAPGTPARFSGSLLGGKAALTLSGVQPEDEAEYYCVLWYSNRWVFGCGTKLTVL

SEQ ID NO: 349 - protein, 1524 aa, Artificial Sequence
  Synthetic
ELVMTQSPSSLTVTAGEKVTMSCKSSQSLLNSGNQKNYLTWYQQKPGQPPKLLIYWASTRESGVPDRFTGSGSGTDFTLTISSVQAEDLAVYYCQNDYSYPLTFGAGTKLEIKGGGGSGGGGSGGGGSEVQLLEQSGAELVRPGTSVKISCKASGYAFTNYWLGWVKQRPGHGLEWIGDIFPGSGNIHYNEKFKGKATLTADKSSSTAYMQLSSLTFEDSAVYFCARLRNWDEPMDYWGQGTTVTVSSGGGGSEVQLVESGGGLVQPGGSLKLSCAASGFTFNKYAMNWVRQAPGKCLEWVARIRSKYNNYATYYADSVKDRFTISRDDSKNTAYLQMNNLKTEDTAVYYCVRHGNFGNSYISYWAYWGQGTLVTVSSGGGGSGGGGSGGGGSQTVVTQEPSLTVSPGGTVTLTCGSSTGAVTSGNYPNWVQQKPGQAPRGLIGGTKFLAPGTPARFSGSLLGGKAALTLSGVQPEDEAEYYCVLWYSNRWVFGCGTKLTVLGGGGSGGGGSGGGGSDKTHTCPPCPAPELLGGPSVFLFPPKPKDTLMISRTPEVTCVVVDVSHEDPEVKFNWYVDGVEVHNAKTKPCEEQYGSTYRCVSVLTVLHQDWLNGKEYKCKVSNKALPAPIEKTISKAKGQPREPQVYTLPPSREEMTKNQVSLTCLVKGFYPSDIAVEWESNGQPENNYKTTPPVLDSDGSFFLYSKLTVDKSRWQQGNVFSCSVMHEALHNHYTQKSLSLSPGKGGGGSGGGGSGGGGSGGGGSGGGGSGGGGSDKTHTCPPCPAPELLGGPSVFLFPPKPKDTLMISRTPEVTCVVVDVSHEDPEVKFNWYVDGVEVHNAKTKPCEEQYGSTYRCVSVLTVLHQDWLNGKEYKCKVSNKALPAPIEKTISKAKGQPREPQVYTLPPSREEMTKNQVSLTCLVKGFYPSDIAVEWESNGQPENNYKTTPPVLDSDGSFFLYSKLTVDKSRWQQGNVFSCSVMHEALHNHYTQKSLSLSPGKGGGGSGGGGSGGGGSEVQLVESGGGLVQPGGSLKLSCAASGFTFNKYAMNWVRQAPGKCLEWVARIRSKYNNYATYYADSVKDRFTISRDDSKNTAYLQMNNLKTEDTAVYYCVRHGNFGNSYISYWAYWGQGTLVTVSSGGGGSGGGGSGGGGSQTVVTQEPSLTVSPGGTVTLTCGSSTGAVTSGNYPNWVQQKPGQAPRGLIGGTKFLAPGTPARFSGSLLGGKAALTLSGVQPEDEAEYYCVLWYSNRWVFGCGTKLTVLGGGGSEVQLLESGGGVVQPGRSLRLSCAASGFTFSSYGMGWVRQAPGKGLEWVAVISYDGSNKYYADSVKGRFTISRDNSKNTLYLQMNSLRAEDTAVYYCAREGAHFGSGSYYPLYYYYAMDVWGQGTTVTVSSGGGGSGGGGSGGGGSELTLTQSPGTLSLSPGERATLSCRASQSVSSSYLAWYQQKPGQAPRLLIYGASIRATGIPDRFSGSGSGTDFTLTISRLEPEDFAVYYCQQYGSSPIFTFGPGTKVEIK

SEQ ID NO: 350 - protein, 1061 aa, Artificial Sequence
  Synthetic
ELVMTQSPSSLTVTAGEKVTMSCKSSQSLLNSGNQKNYLTWYQQKPGQPPKLLIYWASTRESGVPDRFTGSGSGTDFTLTISSVQAEDLAVYYCQNDYSYPLTFGAGTKLEIKGGGGSGGGGSGGGGSEVQLLEQSGAELVRPGTSVKISCKASGYAFTNYWLGWVKQRPGHGLEWIGDIFPGSGNIHYNEKFKGKATLTADKSSSTAYMQLSSLTFEDSAVYFCARLRNWDEPMDYWGQGTTVTVSSGGGGSEVQLVESGGGLVQPGGSLKLSCAASGFTFNKYAMNWVRQAPGKCLEWVARIRSKYNNYATYYADSVKDRFTISRDDSKNTAYLQMNNLKTEDTAVYYCVRHGNFGNSYISYWAYWGQGTLVTVSSGGGGSGGGGSGGGGSQTVVTQEPSLTVSPGGTVTLTCGSSTGAVTSGNYPNWVQQKPGQAPRGLIGGTKFLAPGTPARFSGSLLGGKAALTLSGVQPEDEAEYYCVLWYSNRWVFGCGTKLTVLGGGGSGGGGSGGGGSGGGGSGGGGSGGGGSGGGGSGGGGSGGGGSGGGGSEVQLLESGGGVVQPGRSLRLSCAASGFTFSSYGMGWVRQAPGKGLEWVAVISYDGSNKYYADSVKGRFTISRDNSKNTLYLQMNSLRAEDTAVYYCAREGAHFGSGSYYPLYYYYAMDVWGQGTTVTVSSGGGGSGGGGSGGGGSELTLTQSPGTLSLSPGERATLSCRASQSVSSSYLAWYQQKPGQAPRLLIYGASIRATGIPDRFSGSGSGTDFTLTISRLEPEDFAVYYCQQYGSSPIFTFGPGTKVEIKSGGGGSEVQLVESGGGLVQPGGSLKLSCAASGFTFNKYAMNWVRQAPGKCLEWVARIRSKYNNYATYYADSVKDRFTISRDDSKNTAYLQMNNLKTEDTAVYYCVRHGNFGNSYISYWAYWGQGTLVTVSSGGGGSGGGGSGGGGSQTVVTQEPSLTVSPGGTVTLTCGSSTGAVTSGNYPNWVQQKPGQAPRGLIGGTKFLAPGTPARFSGSLLGGKAALTLSGVQPEDEAEYYCVLWYSNRWVFGCGTKLTVL

SEQ ID NO: 351 - protein, 1164 aa, Artificial Sequence
  Synthetic
ELVMTQSPSSLTVTAGEKVTMSCKSSQSLLNSGNQKNYLTWYQQKPGQPPKLLIYWASTRESGVPDRFTGSGSGTDFTLTISSVQAEDLAVYYCQNDYSYPLTFGAGTKLEIKGGGGSGGGGSGGGGSEVQLLEQSGAELVRPGTSVKISCKASGYAFTNYWLGWVKQRPGHGLEWIGDIFPGSGNIHYNEKFKGKATLTADKSSSTAYMQLSSLTFEDSAVYFCARLRNWDEPMDYWGQGTTVTVSSGGGGSEVQLVESGGGLVQPGGSLKLSCAASGFTFNKYAMNWVRQAPGKCLEWVARIRSKYNNYATYYADSVKDRFTISRDDSKNTAYLQMNNLKTEDTAVYYCVRHGNFGNSYISYWAYWGQGTLVTVSSGGGGSGGGGSGGGGSQTVVTQEPSLTVSPGGTVTLTCGSSTGAVTSGNYPNWVQQKPGQAPRGLIGGTKFLAPGTPARFSGSLLGGKAALTLSGVQPEDEAEYYCVLWYSNRWVFGCGTKLTVLGGGGSLDSPDRPWNPPTFSPALLVVTEGDNATFTCSFSNTSESFVLNWYRMSPSNQTDKLAAFPEDRSQPGQDCRFRVTQLPNGRDFHMSVVRARRNDSGTYLCGAISLAPKAQIKESLRAELRVTERRAEVPTAHPSPSPRPAGQFQGGGGSEVQLLESGGGVVQPGRSLRLSCAASGFTFSSYGMGWVRQAPGKGLEWVAVISYDGSNKYYADSVKGRFTISRDNSKNTLYLQMNSLRAEDTAVYYCAREGAHFGSGSYYPLYYYYAMDVWGQGTTVTVSSGGGGSGGGGSGGGGSELTLTQSPGTLSLSPGERATLSCRASQSVSSSYLAWYQQKPGQAPRLLIYGASIRATGIPDRFSGSGSGTDFTLTISRLEPEDFAVYYCQQYGSSPIFTFGPGTKVEIKSGGGGSEVQLVESGGGLVQPGGSLKLSCAASGFTFNKYAMNWVRQAPGKCLEWVARIRSKYNNYATYYADSVKDRFTISRDDSKNTAYLQMNNLKTEDTAVYYCVRHGNFGNSYISYWAYWGQGTLVTVSSGGGGSGGGGSGGGGSQTVVTQEPSLTVSPGGTVTLTCGSSTGAVTSGNYPNWVQQKPGQAPRGLIGGTKFLAPGTPARFSGSLLGGKAALTLSGVQPEDEAEYYCVLWYSNRWVFGCGTKLTVL

SEQ ID NO: 352 - protein, 1595 aa, Artificial Sequence
  Synthetic
ELVMTQSPSSLTVTAGEKVTMSCKSSQSLLNSGNQKNYLTWYQQKPGQPPKLLIYWASTRESGVPDRFTGSGSGTDFTLTISSVQAEDLAVYYCQNDYSYPLTFGAGTKLEIKGGGGSGGGGSGGGGSEVQLLEQSGAELVRPGTSVKISCKASGYAFTNYWLGWVKQRPGHGLEWIGDIFPGSGNIHYNEKFKGKATLTADKSSSTAYMQLSSLTFEDSAVYFCARLRNWDEPMDYWGQGTTVTVSSGEAAAKEAAAKEAAAKEAAAKEAAAKEAAAKEAAAKEAAAKEAAAKEAAAKEVQLVESGGGLVQPGGSLKLSCAASGFTFNKYAMNWVRQAPGKCLEWVARIRSKYNNYATYYADSVKDRFTISRDDSKNTAYLQMNNLKTEDTAVYYCVRHGNFGNSYISYWAYWGQGTLVTVSSGGGGSGGGGSGGGGSQTVVTQEPSLTVSPGGTVTLTCGSSTGAVTSGNYPNWVQQKPGQAPRGLIGGTKFLAPGTPARFSGSLLGGKAALTLSGVQPEDEAEYYCVLWYSNRWVFGCGTKLTVLGGGGDKTHTCPPCPAPELLGGPSVFLFPPKPKDTLMISRTPEVTCVVVDVSHEDPEVKFNWYVDGVEVHNAKTKPCEEQYGSTYRCVSVLTVLHQDWLNGKEYKCKVSNKALPAPIEKTISKAKGQPREPQVYTLPPSREEMTKNQVSLTCLVKGFYPSDIAVEWESNGQPENNYKTTPPVLDSDGSFFLYSKLTVDKSRWQQGNVFSCSVMHEALHNHYTQKSLSLSPGKGGGGSGGGGSGGGGSGGGGSGGGGSGGGGSDKTHTCPPCPAPELLGGPSVFLFPPKPKDTLMISRTPEVTCVVVDVSHEDPEVKFNWYVDGVEVHNAKTKPCEEQYGSTYRCVSVLTVLHQDWLNGKEYKCKVSNKALPAPIEKTISKAKGQPREPQVYTLPPSREEMTKNQVSLTCLVKGFYPSDIAVEWESNGQPENNYKTTPPVLDSDGSFFLYSKLTVDKSRWQQGNVFSCSVMHEALHNHYTQKSLSLSPGKGGGGEVQLLESGGGVVQPGRSLRLSCAASGFTFSSYGMGWVRQAPGKGLEWVAVISYDGSNKYYADSVKGRFTISRDNSKNTLYLQMNSLRAEDTAVYYCAREGAHFGSGSYYPLYYYYAMDVWGQGTTVTVSSGGGGSGGGGSGGGGSELTLTQSPGTLSLSPGERATLSCRASQSVSSSYLAWYQQKPGQAPRLLIYGASIRATGIPDRFSGSGSGTDFTLTISRLEPEDFAVYYCQQYGSSPIFTFGPGTKVEIKSGEAAAKEAAAKEAAAKEAAAKEAAAKEAAAKEAAAKEAAAKEAAAKEAAAKEVQLVESGGGLVQPGGSLKLSCAASGFTFNKYAMNWVRQAPGKCLEWVARIRSKYNNYATYYADSVKDRFTISRDDSKNTAYLQMNNLKTEDTAVYYCVRHGNFGNSYISYWAYWGQGTLVTVSSGGGGSGGGGSGGGGSQTVVTQEPSLTVSPGGTVTLTCGSSTGAVTSGNYPNWVQQKPGQAPRGLIGGTKFLAPGTPARFSGSLLGGKAALTLSGVQPEDEAEYYCVLWYSNRWVFGCGTKLTVL

SEQ ID NO: 353 - protein, 1523 aa, Artificial Sequence
  Synthetic
ELVMTQSPSSLTVTAGEKVTMSCKSSQSLLNSGNQKNYLTWYQQKPGQPPKLLIYWASTRESGVPDRFTGSGSGTDFTLTISSVQAEDLAVYYCQNDYSYPLTFGAGTKLEIKGGGGSGGGGSGGGGSEVQLLEQSGAELVRPGTSVKISCKASGYAFTNYWLGWVKQRPGHGLEWIGDIFPGSGNIHYNEKFKGKATLTADKSSSTAYMQLSSLTFEDSAVYFCARLRNWDEPMDYWGQGTTVTVSSGGGGSGGGGSGGGGSEVQLVESGGGLVQPGGSLKLSCAASGFTFNKYAMNWVRQAPGKCLEWVARIRSKYNNYATYYADSVKDRFTISRDDSKNTAYLQMNNLKTEDTAVYYCVRHGNFGNSYISYWAYWGQGTLVTVSSGGGGSGGGGSGGGGSQTVVTQEPSLTVSPGGTVTLTCGSSTGAVTSGNYPNWVQQKPGQAPRGLIGGTKFLAPGTPARFSGSLLGGKAALTLSGVQPEDEAEYYCVLWYSNRWVFGCGTKLTVLGGGGDKTHTCPPCPAPELLGGPSVFLFPPKPKDTLMISRTPEVTCVVVDVSHEDPEVKFNWYVDGVEVHNAKTKPCEEQYGSTYRCVSVLTVLHQDWLNGKEYKCKVSNKALPAPIEKTISKAKGQPREPQVYTLPPSREEMTKNQVSLTCLVKGFYPSDIAVEWESNGQPENNYKTTPPVLDSDGSFFLYSKLTVDKSRWQQGNVFSCSVMHEALHNHYTQKSLSLSPGKGGGGSGGGGSGGGGSGGGGSGGGGSGGGGSDKTHTCPPCPAPELLGGPSVFLFPPKPKDTLMISRTPEVTCVVVDVSHEDPEVKFNWYVDGVEVHNAKTKPCEEQYGSTYRCVSVLTVLHQDWLNGKEYKCKVSNKALPAPIEKTISKAKGQPREPQVYTLPPSREEMTKNQVSLTCLVKGFYPSDIAVEWESNGQPENNYKTTPPVLDSDGSFFLYSKLTVDKSRWQQGNVFSCSVMHEALHNHYTQKSLSLSPGKGGGGEVQLLESGGGVVQPGRSLRLSCAASGFTFSSYGMGWVRQAPGKGLEWVAVISYDGSNKYYADSVKGRFTISRDNSKNTLYLQMNSLRAEDTAVYYCAREGAHFGSGSYYPLYYYYAMDVWGQGTTVTVSSGGGGSGGGGSGGGGSELTLTQSPGTLSLSPGERATLSCRASQSVSSSYLAWYQQKPGQAPRLLIYGASIRATGIPDRFSGSGSGTDFTLTISRLEPEDFAVYYCQQYGSSPIFTFGPGTKVEIKSGGGGSGGGGSGGGGSEVQLVESGGGLVQPGGSLKLSCAASGFTFNKYAMNWVRQAPGKCLEWVARIRSKYNNYATYYADSVKDRFTISRDDSKNTAYLQMNNLKTEDTAVYYCVRHGNFGNSYISYWAYWGQGTLVTVSSGGGGSGGGGSGGGGSQTVVTQEPSLTVSPGGTVTLTCGSSTGAVTSGNYPNWVQQKPGQAPRGLIGGTKFLAPGTPARFSGSLLGGKAALTLSGVQPEDEAEYYCVLWYSNRWVFGCGTKLTVL

SEQ ID NO: 354 - protein, 1495 aa, Artificial Sequence
  Synthetic
ELVMTQSPSSLTVTAGEKVTMSCKSSQSLLNSGNQKNYLTWYQQKPGQPPKLLIYWASTRESGVPDRFTGSGSGTDFTLTISSVQAEDLAVYYCQNDYSYPLTFGAGTKLEIKGGGGSGGGGSGGGGSEVQLLEQSGAELVRPGTSVKISCKASGYAFTNYWLGWVKQRPGHGLEWIGDIFPGSGNIHYNEKFKGKATLTADKSSSTAYMQLSSLTFEDSAVYFCARLRNWDEPMDYWGQGTTVTVSSGGGGSEVQLVESGGGLVQPGGSLKLSCAASGFTFNKYAMNWVRQAPGKCLEWVARIRSKYNNYATYYADSVKDRFTISRDDSKNTAYLQMNNLKTEDTAVYYCVRHGNFGNSYISYWAYWGQGTLVTVSSGGGGSGGGGSGGGGSQTVVTQEPSLTVSPGGTVTLTCGSSTGAVTSGNYPNWVQQKPGQAPRGLIGGTKFLAPGTPARFSGSLLGGKAALTLSGVQPEDEAEYYCVLWYSNRWVFGCGTKLTVLDKTHTCPPCPAPELLGGPSVFLFPPKPKDTLMISRTPEVTCVVVDVSHEDPEVKFNWYVDGVEVHNAKTKPCEEQYGSTYRCVSVLTVLHQDWLNGKEYKCKVSNKALPAPIEKTISKAKGQPREPQVYTLPPSREEMTKNQVSLTCLVKGFYPSDIAVEWESNGQPENNYKTTPPVLDSDGSFFLYSKLTVDKSRWQQGNVFSCSVMHEALHNHYTQKSLSLSPGKGGGGSGGGGSGGGGSGGGGSGGGGSGGGGSDKTHTCPPCPAPELLGGPSVFLFPPKPKDTLMISRTPEVTCVVVDVSHEDPEVKFNWYVDGVEVHNAKTKPCEEQYGSTYRCVSVLTVLHQDWLNGKEYKCKVSNKALPAPIEKTISKAKGQPREPQVYTLPPSREEMTKNQVSLTCLVKGFYPSDIAVEWESNGQPENNYKTTPPVLDSDGSFFLYSKLTVDKSRWQQGNVFSCSVMHEALHNHYTQKSLSLSPGKEVQLLESGGGVVQPGRSLRLSCAASGFTFSSYGMGWVRQAPGKGLEWVAVISYDGSNKYYADSVKGRFTISRDNSKNTLYLQMNSLRAEDTAVYYCAREGAHFGSGSYYPLYYYYAMDVWGQGTTVTVSSGGGGSGGGGSGGGGSELTLTQSPGTLSLSPGERATLSCRASQSVSSSYLAWYQQKPGQAPRLLIYGASIRATGIPDRFSGSGSGTDFTLTISRLEPEDFAVYYCQQYGSSPIFTFGPGTKVEIKSGGGGSEVQLVESGGGLVQPGGSLKLSCAASGFTFNKYAMNWVRQAPGKCLEWVARIRSKYNNYATYYADSVKDRFTISRDDSKNTAYLQMNNLKTEDTAVYYCVRHGNFGNSYISYWAYWGQGTLVTVSSGGGGSGGGGSGGGGSQTVVTQEPSLTVSPGGTVTLTCGSSTGAVTSGNYPNWVQQKPGQAPRGLIGGTKFLAPGTPARFSGSLLGGKAALTLSGVQPEDEAEYYCVLWYSNRWVFGCGTKLTVL

SEQ ID NO: 355 - protein, 1588 aa, Artificial Sequence
  Synthetic
ELVMTQSPSSLTVTAGEKVTMSCKSSQSLLNSGNQKNYLTWYQQKPGQPPKLLIYWASTRESGVPDRFTGSGSGTDFTLTISSVQAEDLAVYYCQNDYSYPLTFGAGTKLEIKGGGGSGGGGSGGGGSEVQLLEQSGAELVRPGTSVKISCKASGYAFTNYWLGWVKQRPGHGLEWIGDIFPGSGNIHYNEKFKGKATLTADKSSSTAYMQLSSLTFEDSAVYFCARLRNWDEPMDYWGQGTTVTVSSGGGGSGGGGSGGGGSGGGGSGGGGSGGGGSGGGGSGGGGSGGGGSGGGGSEVQLVESGGGLVQPGGSLKLSCAASGFTFNKYAMNWVRQAPGKCLEWVARIRSKYNNYATYYADSVKDRFTISRDDSKNTAYLQMNNLKTEDTAVYYCVRHGNFGNSYISYWAYWGQGTLVTVSSGGGGSGGGGSGGGGSQTVVTQEPSLTVSPGGTVTLTCGSSTGAVTSGNYPNWVQQKPGQAPRGLIGGTKFLAPGTPARFSGSLLGGKAALTLSGVQPEDEAEYYCVLWYSNRWVFGCGTKLTVLGGGGDKTHTCPPCPAPELLGGPSVFLFPPKPKDTLMISRTPEVTCVVVDVSHEDPEVKFNWYVDGVEVHNAKTKPCEEQYGSTYRCVSVLTVLHQDWLNGKEYKCKVSNKALPAPIEKTISKAKGQPREPQVYTLPPSREEMTKNQVSLTCLVKGFYPSDIAVEWESNGQPENNYKTTPPVLDSDGSFFLYSKLTVDKSRWQQGNVFSCSVMHEALHNHYTQKSLSLSPGKGGGGSGGGGSGGGGSGGGGSGGGGSGGGGSDKTHTCPPCPAPELLGGPSVFLFPPKPKDTLMISRTPEVTCVVVDVSHEDPEVKFNWYVDGVEVHNAKTKPCEEQYGSTYRCVSVLTVLHQDWLNGKEYKCKVSNKALPAPIEKTISKAKGQPREPQVYTLPPSREEMTKNQVSLTCLVKGFYPSDIAVEWESNGQPENNYKTTPPVLDSDGSFFLYSKLTVDKSRWQQGNVFSCSVMHEALHNHYTQKSLSLSPGKGGGGEVQLVESGGGLVQPGGSLKLSCAASGFTFNKYAMNWVRQAPGKCLEWVARIRSKYNNYATYYADSVKDRFTISRDDSKNTAYLQMNNLKTEDTAVYYCVRHGNFGNSYISYWAYWGQGTLVTVSSGGGGSGGGGSGGGGSQTVVTQEPSLTVSPGGTVTLTCGSSTGAVTSGNYPNWVQQKPGQAPRGLIGGTKFLAPGTPARFSGSLLGGKAALTLSGVQPEDEAEYYCVLWYSNRWVFGCGTKLTVLSGGGGSGGGGSGGGGSGGGGSGGGGSGGGGSGGGGSGGGGSGGGGSEVQLLESGGGVVQPGRSLRLSCAASGFTFSSYGMGWVRQAPGKGLEWVAVISYDGSNKYYADSVKGRFTISRDNSKNTLYLQMNSLRAEDTAVYYCAREGAHFGSGSYYPLYYYYAMDVWGQGTTVTVSSGGGGSGGGGSGGGGSELTLTQSPGTLSLSPGERATLSCRASQSVSSSYLAWYQQKPGQAPRLLIYGASIRATGIPDRFSGSGSGTDFTLTISRLEPEDFAVYYCQQYGSSPIFTFGPGTKVEIK

SEQ ID NO: 356 - protein, 5 aa, Artificial Sequence
  Synthetic
SYWMH

SEQ ID NO: 357 - protein, 17 aa, Artificial Sequence
  Synthetic
YITPSTGYTEYNQKFKG

SEQ ID NO: 358 - protein, 10 aa, Artificial Sequence
  Synthetic
VHDYDRAMEY

SEQ ID NO: 359 - protein, 11 aa, Artificial Sequence
  Synthetic
KASQDINKYIA

SEQ ID NO: 360 - protein, 7 aa, Artificial Sequence
  Synthetic
YTSTLQP

SEQ ID NO: 361 - protein, 9 aa, Artificial Sequence
  Synthetic
LQYASYPFT

SEQ ID NO: 362 - protein, 119 aa, Artificial Sequence
  Synthetic
QVQLVQSGAEVKKPGASVKVSCKASGYTFTSYWMHWVRQAPGQCLEWIGYITPSTGYTEYNQKFKGRVTMTRDKSTSTVYMELSSLTSEDTAVYYCARVHDYDRAMEYWGQGTTVTVSS

SEQ ID NO: 363 - protein, 107 aa, Artificial Sequence
  Synthetic
DIQMTQSPSSLSASVGDRVTITCKASQDINKYIAWYQQKPGKGPKLLIYYTSTLQPGVPSRFSGSGSGTDFTFTISSLQPEDIATYYCLQYASYPFTFGCGTRLEIK

SEQ ID NO: 364 - protein, 107 aa, Artificial Sequence
  Synthetic
EIQMTQSPSSLSASVGDRVTITCKASQDINKYIAWYQQKPGKGPKLLIYYTSTLQPGVPSRFSGSGSGTDFTFTISSLQPEDIATYYCLQYASYPFTFGCGTRLEIK

SEQ ID NO: 365 - protein, 5 aa, Artificial Sequence
  Synthetic
SYGIS

SEQ ID NO: 366 - protein, 17 aa, Artificial Sequence
  Synthetic
WISAYSGNAIYAQKLQG

SEQ ID NO: 367 - protein, 13 aa, Artificial Sequence
  Synthetic
DPDYYGSGSYSDY

SEQ ID NO: 368 - protein, 11 aa, Artificial Sequence
  Synthetic
RASQSVSSNLA

SEQ ID NO: 369 - protein, 7 aa, Artificial Sequence
  Synthetic
GASSRAT

SEQ ID NO: 370 - protein, 10 aa, Artificial Sequence
  Synthetic
QQYHSWPLLT

SEQ ID NO: 371 - protein, 122 aa, Artificial Sequence
  Synthetic
QVQLVQSGAEVKKPGASVKVSCKASGYTFTSYGISWVRQAPGQCLEWMGWISAYSGNAIYAQKLQGRVTMTRDTSTSTAYMELRSLRSDDTAVYYCARDPDYYGSGSYSDYWGQGTLVTVSS

SEQ ID NO: 372 - protein, 108 aa, Artificial Sequence
  Synthetic
EIVLTQSPATLSVSPGERATLSCRASQSVSSNLAWYQQKPGQAPRLLIYGASSRATGIPARFSGSGSGTEFTLTISSLQSEDFAVYYCQQYHSWPLLTFGCGTKVEIK

SEQ ID NO: 373 - protein, 1510 aa, Artificial Sequence
  Synthetic
QVQLVQSGAEVKKPGASVKVSCKASGYTFTSYGISWVRQAPGQCLEWMGWISAYSGNAIYAQKLQGRVTMTRDTSTSTAYMELRSLRSDDTAVYYCARDPDYYGSGSYSDYWGQGTLVTVSSGGGGSGGGGSGGGGSEIVLTQSPATLSVSPGERATLSCRASQSVSSNLAWYQQKPGQAPRLLIYGASSRATGIPARFSGSGSGTEFTLTISSLQSEDFAVYYCQQYHSWPLLTFGCGTKVEIKSGGGGSEVQLVESGGGLVQPGGSLKLSCAASGFTFNKYAMNWVRQAPGKGLEWVARIRSKYNNYATYYADSVKDRFTISRDDSKNTAYLQMNNLKTEDTAVYYCVRHGNFGNSYISYWAYWGQGTLVTVSSGGGGSGGGGSGGGGSQTVVTQEPSLTVSPGGTVTLTCGSSTGAVTSGNYPNWVQQKPGQAPRGLIGGTKFLAPGTPARFSGSLLGGKAALTLSGVQPEDEAEYYCVLWYSNRWVFGGGTKLTVLGGGGSGGGGSGGGGSDKTHTCPPCPAPELLGGPSVFLFPPKPKDTLMISRTPEVTCVVVDVSHEDPEVKFNWYVDGVEVHNAKTKPCEEQYGSTYRCVSVLTVLHQDWLNGKEYKCKVSNKALPAPIEKTISKAKGQPREPQVYTLPPSREEMTKNQVSLTCLVKGFYPSDIAVEWESNGQPENNYKTTPPVLDSDGSFFLYSKLTVDKSRWQQGNVFSCSVMHEALHNHYTQKSLSLSPGKGGGGSGGGGSGGGGSGGGGSGGGGSGGGGSDKTHTCPPCPAPELLGGPSVFLFPPKPKDTLMISRTPEVTCVVVDVSHEDPEVKFNWYVDGVEVHNAKTKPCEEQYGSTYRCVSVLTVLHQDWLNGKEYKCKVSNKALPAPIEKTISKAKGQPREPQVYTLPPSREEMTKNQVSLTCLVKGFYPSDIAVEWESNGQPENNYKTTPPVLDSDGSFFLYSKLTVDKSRWQQGNVFSCSVMHEALHNHYTQKSLSLSPGKGGGGSGGGGSGGGGSQVQLVQSGAEVKKPGASVKVSCKASGYTFTSYWMHWVRQAPGQCLEWIGYITPSTGYTEYNQKFKGRVTMTRDKSTSTVYMELSSLTSEDTAVYYCARVHDYDRAMEYWGQGTTVTVSSGGGGSGGGGSGGGGSDIQMTQSPSSLSASVGDRVTITCKASQDINKYIAWYQQKPGKGPKLLIYYTSTLQPGVPSRFSGSGSGTDFTFTISSLQPEDIATYYCLQYASYPFTFGCGTRLEIKSGGGGSEVQLVESGGGLVQPGGSLKLSCAASGFTFNKYAMNWVRQAPGKGLEWVARIRSKYNNYATYYADSVKDRFTISRDDSKNTAYLQMNNLKTEDTAVYYCVRHGNFGNSYISYWAYWGQGTLVTVSSGGGGSGGGGSGGGGSQTVVTQEPSLTVSPGGTVTLTCGSSTGAVTSGNYPNWVQQKPGQAPRGLIGGTKFLAPGTPARFSGSLLGGKAALTLSGVQPEDEAEYYCVLWYSNRWVFGGGTKLTVL

SEQ ID NO: 374 - protein, 1500 aa, Artificial Sequence
  Synthetic
QVQLVQSGAEVKKPGASVKVSCKASGYTFTSYGISWVRQAPGQCLEWMGWISAYSGNAIYAQKLQGRVTMTRDTSTSTAYMELRSLRSDDTAVYYCARDPDYYGSGSYSDYWGQGTLVTVSSGGGGQGGGGQGGGGQEIVLTQSPATLSVSPGERATLSCRASQSVSSNLAWYQQKPGQAPRLLIYGASSRATGIPARFSGSGSGTEFTLTISSLQSEDFAVYYCQQYHSWPLLTFGCGTKVEIKSGGGGQEVQLVESGGGLVQPGGSLKLSCAASGFTFNKYAINWVRQAPGKGLEWVARIRSKYNNYATYYADAVKDRFTISRDDSKNTVYLQMNNLKTEDTAVYYCARAGNFGSSYISYWAYWGQGTLVTVSSGGGGQGGGGQGGGGQQTVVTQEPSLTVSPGGTVTITCGSSTGAVTSGNYPNWVQKKPGQAPRGLIGGTKFLAPGTPARFSGSLSGGKAALTLSGVQPEDEAEYYCVLWYSNRWVFGSGTKLTVLGGGGQGGGGQGGGGQCPPCPAPELLGGPSVFLFPPKPKDTLMISRTPEVTCVVVDVSHEEPEVKFNWYVDGVEVHNAKTKPCEEQYGSTYRCVSVLTVLHQDWLNGKEYKCKVSNKALPAPIEKTISKAKGQPREPQVYTLPPSREEMTKNQVSLTCLVKGFYPSDIAVEWESNGQPENNYKTTPPVLDSDGSFFLYSKLTVDKSRWQQGNVFSCSVMHEALHNHYTQKSLSLSPGKGGGGQGGGGQGGGGQGGGGQGGGGQGGGGQCPPCPAPELLGGPSVFLFPPKPKDTLMISRTPEVTCVVVDVSHEEPEVKFNWYVDGVEVHNAKTKPCEEQYGSTYRCVSVLTVLHQDWLNGKEYKCKVSNKALPAPIEKTISKAKGQPREPQVYTLPPSREEMTKNQVSLTCLVKGFYPSDIAVEWESNGQPENNYKTTPPVLDSDGSFFLYSKLTVDKSRWQQGNVFSCSVMHEALHNHYTQKSLSLSPGKGGGGQGGGGQGGGGQQVQLVQSGAEVKKPGASVKVSCKASGYTFTSYWMHWVRQAPGQCLEWIGYITPSTGYTEYNQKFKGRVTMTRDKSTSTVYMELSSLTSEDTAVYYCARVHDYDRAMEYWGQGTTVTVSSGGGGQGGGGQGGGGQEIQMTQSPSSLSASVGDRVTITCKASQDINKYIAWYQQKPGKGPKLLIYYTSTLQPGVPSRFSGSGSGTDFTFTISSLQPEDIATYYCLQYASYPFTFGCGTRLEIKSGGGGQEVQLVESGGGLVQPGGSLKLSCAASGFTFNKYAINWVRQAPGKGLEWVARIRSKYNNYATYYADAVKDRFTISRDDSKNTVYLQMNNLKTEDTAVYYCARAGNFGSSYISYWAYWGQGTLVTVSSGGGGQGGGGQGGGGQQTVVTQEPSLTVSPGGTVTITCGSSTGAVTSGNYPNWVQKKPGQAPRGLIGGTKFLAPGTPARFSGSLSGGKAALTLSGVQPEDEAEYYCVLWYSNRWVFGSGTKLTVL

SEQ ID NO: 375 - protein, 1478 aa, Artificial Sequence
  Synthetic
QVQLVQSGAEVKKPGASVKVSCKASGYTFTSYGISWVRQAPGQCLEWMGWISAYSGNAIYAQKLQGRVTMTRDTSTSTAYMELRSLRSDDTAVYYCARDPDYYGSGSYSDYWGQGTLVTVSSGGGGQGGGGQGGGGQEIVLTQSPATLSVSPGERATLSCRASQSVSSNLAWYQQKPGQAPRLLIYGASSRATGIPARFSGSGSGTEFTLTISSLQSEDFAVYYCQQYHSWPLLTFGCGTKVEIKSGGGGQEVQLVESGGGLVQPGGSLKLSCAASGFTFNKYAINWVRQAPGKGLEWVARIRSKYNNYATYYADAVKDRFTISRDDSKNTVYLQMNNLKTEDTAVYYCARAGNFGSSYISYWAYWGQGTLVTVSSGGGGQGGGGQGGGGQQTVVTQEPSLTVSPGGTVTITCGSSTGAVTSGNYPNWVQKKPGQAPRGLIGGTKFLAPGTPARFSGSLSGGKAALTLSGVQPEDEAEYYCVLWYSNRWVFGSGTKLTVLGGGGCPPCPAPELLGGPSVFLFPPKPKDTLMISRTPEVTCVVVDVSHEEPEVKFNWYVDGVEVHNAKTKPCEEQYGSTYRCVSVLTVLHQDWLNGKEYKCKVSNKALPAPIEKTISKAKGQPREPQVYTLPPSREEMTKNQVSLTCLVKGFYPSDIAVEWESNGQPENNYKTTPPVLDSDGSFFLYSKLTVDKSRWQQGNVFSCSVMHEALHNHYTQKSLSLSPGKGGGGQGGGGQGGGGQGGGGQGGGGQGGGGQCPPCPAPELLGGPSVFLFPPKPKDTLMISRTPEVTCVVVDVSHEEPEVKFNWYVDGVEVHNAKTKPCEEQYGSTYRCVSVLTVLHQDWLNGKEYKCKVSNKALPAPIEKTISKAKGQPREPQVYTLPPSREEMTKNQVSLTCLVKGFYPSDIAVEWESNGQPENNYKTTPPVLDSDGSFFLYSKLTVDKSRWQQGNVFSCSVMHEALHNHYTQKSLSLSPGKGGGGQVQLVQSGAEVKKPGASVKVSCKASGYTFTSYWMHWVRQAPGQCLEWIGYITPSTGYTEYNQKFKGRVTMTRDKSTSTVYMELSSLTSEDTAVYYCARVHDYDRAMEYWGQGTTVTVSSGGGGQGGGGQGGGGQEIQMTQSPSSLSASVGDRVTITCKASQDINKYIAWYQQKPGKGPKLLIYYTSTLQPGVPSRFSGSGSGTDFTFTISSLQPEDIATYYCLQYASYPFTFGCGTRLEIKSGGGGQEVQLVESGGGLVQPGGSLKLSCAASGFTFNKYAINWVRQAPGKGLEWVARIRSKYNNYATYYADAVKDRFTISRDDSKNTVYLQMNNLKTEDTAVYYCARAGNFGSSYISYWAYWGQGTLVTVSSGGGGQGGGGQGGGGQQTVVTQEPSLTVSPGGTVTITCGSSTGAVTSGNYPNWVQKKPGQAPRGLIGGTKFLAPGTPARFSGSLSGGKAALTLSGVQPEDEAEYYCVLWYSNRWVFGSGTKLTVL

SEQ ID NO: 376 - protein, 5 aa, Artificial Sequence
  Synthetic
DYYMH

SEQ ID NO: 377 - protein, 17 aa, Artificial Sequence
  Synthetic
WINPNSGGPNYAQKFQG

SEQ ID NO: 378 - protein, 12 aa, Artificial Sequence
  Synthetic
EKHAVAGIGFDY

SEQ ID NO: 379 - protein, 11 aa, Artificial Sequence
  Synthetic
QASQDISNYLN

SEQ ID NO: 380 - protein, 7 aa, Artificial Sequence
  Synthetic
AASSLES

SEQ ID NO: 381 - protein, 9 aa, Artificial Sequence
  Synthetic
QQANSFPLT

SEQ ID NO: 382 - protein, 121 aa, Artificial Sequence
  Synthetic
QVQLVQSGAEVKKPGASVKVSCKASGYTFTDYYMHWVRQAPGQCLEWMGWINPNSGGPNYAQKFQGRVTMTRDTSISTAHMELSRLRSDDTAVYYCAREKHAVAGIGFDYWGQGTLVTVSS

SEQ ID NO: 383 - protein, 107 aa, Artificial Sequence
  Synthetic
DIQMTQSPSSVSASVGDRVTITCQASQDISNYLNWYQQKPGKAPKLLIYAASSLESGVPSRFSGSGSGTDFTLTISSLQPEDFATYYCQQANSFPLTFGCGTKVDIK

SEQ ID NO: 384 - protein, 107 aa, Artificial Sequence
  Synthetic
EIQMTQSPSSVSASVGDRVTITCQASQDISNYLNWYQQKPGKAPKLLIYAASSLESGVPSRFSGSGSGTDFTLTISSLQPEDFATYYCQQANSFPLTFGCGTKVDIK

SEQ ID NO: 385 - protein, 7 aa, Artificial Sequence
  Synthetic
NARMGVS

SEQ ID NO: 386 - protein, 16 aa, Artificial Sequence
  Synthetic
HIFSNDEKSYSTSLKS

SEQ ID NO: 387 - protein, 13 aa, Artificial Sequence
  Synthetic
VPEYSSGWYRFDY

SEQ ID NO: 388 - protein, 11 aa, Artificial Sequence
  Synthetic
RASQSIRSYLN

SEQ ID NO: 389 - protein, 7 aa, Artificial Sequence
  Synthetic
ATSSLQG

SEQ ID NO: 390 - protein, 9 aa, Artificial Sequence
  Synthetic
QQSYSTPFT

SEQ ID NO: 391 - protein, 123 aa, Artificial Sequence
  Synthetic
QVTLKESGPTLVKPTETLTLTCTVSGFSFRNARMGVSWIRQPPGKCLEWLAHIFSNDEKSYSTSLKSRLTISKDTSKSQVVLTMTNMDPVDTATYFCARVPEYSSGWYRFDYWGQGTLVTVSS

SEQ ID NO: 392 - protein, 107 aa, Artificial Sequence
  Synthetic
DIQMTQSPSSLSASVGDRVTISCRASQSIRSYLNWYQQKPGKAPKLLIYATSSLQGGVPSRFSGSGSGTDFTLTISSLQPEDFATYYCQQSYSTPFTFGCGTKVEIK

SEQ ID NO: 393 - protein, 107 aa, Artificial Sequence
  Synthetic
EIQMTQSPSSLSASVGDRVTISCRASQSIRSYLNWYQQKPGKAPKLLIYATSSLQGGVPSRFSGSGSGTDFTLTISSLQPEDFATYYCQQSYSTPFTFGCGTKVEIK

SEQ ID NO: 394 - protein, 1512 aa, Artificial Sequence
  Synthetic
QVQLVQSGAEVKKPGASVKVSCKASGYTFTDYYMHWVRQAPGQCLEWMGWINPNSGGPNYAQKFQGRVTMTRDTSISTAHMELSRLRSDDTAVYYCAREKHAVAGIGFDYWGQGTLVTVSSGGGGSGGGGSGGGGSDIQMTQSPSSVSASVGDRVTITCQASQDISNYLNWYQQKPGKAPKLLIYAASSLESGVPSRFSGSGSGTDFTLTISSLQPEDFATYYCQQANSFPLTFGCGTKVDIKSGGGGSEVQLVESGGGLVQPGGSLKLSCAASGFTFNKYAMNWVRQAPGKGMEWVARIRSKYNNYATYYADAVKDRFTISRDDSKNTLYLQMNNLKTEDTAVYYCVRAGNFGKSYISYWAYWGQGTLVTVSSGGGGSGGGGSGGGGSQTVVTQEPSLTVSPGGTVTITCGSSTGAVTSGNYPNWVQKKPGQAPRGLIGGTKFLAPGTPARFSGSLSGGKAALTLSGVQPEDEAEYYCVLWYSNRWVFGSGTKLTVLGGGGSGGGGSGGGGSDKTHTCPPCPAPELLGGPSVFLFPPKPKDTLMISRTPEVTCVVVDVSHEDPEVKFNWYVDGVEVHNAKTKPCEEQYGSTYRCVSVLTVLHQDWLNGKEYKCKVSNKALPAPIEKTISKAKGQPREPQVYTLPPSREEMTKNQVSLTCLVKGFYPSDIAVEWESNGQPENNYKTTPPVLDSDGSFFLYSKLTVDKSRWQQGNVFSCSVMHEALHNHYTQKSLSLSPGKGGGGSGGGGSGGGGSGGGGSGGGGSGGGGSDKTHTCPPCPAPELLGGPSVFLFPPKPKDTLMISRTPEVTCVVVDVSHEDPEVKFNWYVDGVEVHNAKTKPCEEQYGSTYRCVSVLTVLHQDWLNGKEYKCKVSNKALPAPIEKTISKAKGQPREPQVYTLPPSREEMTKNQVSLTCLVKGFYPSDIAVEWESNGQPENNYKTTPPVLDSDGSFFLYSKLTVDKSRWQQGNVFSCSVMHEALHNHYTQKSLSLSPGKGGGGSGGGGSGGGGSQVTLKESGPTLVKPTETLTLTCTVSGFSFRNARMGVSWIRQPPGKCLEWLAHIFSNDEKSYSTSLKSRLTISKDTSKSQVVLTMTNMDPVDTATYFCARVPEYSSGWYRFDYWGQGTLVTVSSGGGGSGGGGSGGGGSDIQMTQSPSSLSASVGDRVTISCRASQSIRSYLNWYQQKPGKAPKLLIYATSSLQGGVPSRFSGSGSGTDFTLTISSLQPEDFATYYCQQSYSTPFTFGCGTKVEIKSGGGGSEVQLVESGGGLVQPGGSLKLSCAASGFTFNKYAMNWVRQAPGKGMEWVARIRSKYNNYATYYADAVKDRFTISRDDSKNTLYLQMNNLKTEDTAVYYCVRAGNFGKSYISYWAYWGQGTLVTVSSGGGGSGGGGSGGGGSQTVVTQEPSLTVSPGGTVTITCGSSTGAVTSGNYPNWVQKKPGQAPRGLIGGTKFLAPGTPARFSGSLSGGKAALTLSGVQPEDEAEYYCVLWYSNRWVFGSGTKLTVL

SEQ ID NO: 395 - protein, 1512 aa, Artificial Sequence
  Synthetic
QVQLVQSGAEVKKPGASVKVSCKASGYTFTDYYMHWVRQAPGQCLEWMGWINPNSGGPNYAQKFQGRVTMTRDTSISTAHMELSRLRSDDTAVYYCAREKHAVAGIGFDYWGQGTLVTVSSGGGGSGGGGSGGGGSDIQMTQSPSSVSASVGDRVTITCQASQDISNYLNWYQQKPGKAPKLLIYAASSLESGVPSRFSGSGSGTDFTLTISSLQPEDFATYYCQQANSFPLTFGCGTKVDIKSGGGGSEVQLVESGGGLVQPGGSLKLSCAASGFTFSKYAMNWVREAPGKGLEWVARIRSKYNNYATYYAEAVKDRFTISRDDSKNTVYLQMNNLKTEDTAVYYCVRAENIGKSYISYWAYWGQGTLVTVSSGGGGSGGGGSGGGGSQTVVTQEPSLTVSPGGTVTMTCGSSTGAVTSGNYPNWVQKKPGQAPRGLIGGTKFLAPGTPARFSGSLEGGKAALTLSGVQPEDEAEYYCVLWYSNRWVFGGGTKLTVLGGGGSGGGGSGGGGSDKTHTCPPCPAPELLGGPSVFLFPPKPKDTLMISRTPEVTCVVVDVSHEDPEVKFNWYVDGVEVHNAKTKPCEEQYGSTYRCVSVLTVLHQDWLNGKEYKCKVSNKALPAPIEKTISKAKGQPREPQVYTLPPSREEMTKNQVSLTCLVKGFYPSDIAVEWESNGQPENNYKTTPPVLDSDGSFFLYSKLTVDKSRWQQGNVFSCSVMHEALHNHYTQKSLSLSPGKGGGGSGGGGSGGGGSGGGGSGGGGSGGGGSDKTHTCPPCPAPELLGGPSVFLFPPKPKDTLMISRTPEVTCVVVDVSHEDPEVKFNWYVDGVEVHNAKTKPCEEQYGSTYRCVSVLTVLHQDWLNGKEYKCKVSNKALPAPIEKTISKAKGQPREPQVYTLPPSREEMTKNQVSLTCLVKGFYPSDIAVEWESNGQPENNYKTTPPVLDSDGSFFLYSKLTVDKSRWQQGNVFSCSVMHEALHNHYTQKSLSLSPGKGGGGSGGGGSGGGGSQVTLKESGPTLVKPTETLTLTCTVSGFSFRNARMGVSWIRQPPGKCLEWLAHIFSNDEKSYSTSLKSRLTISKDTSKSQVVLTMTNMDPVDTATYFCARVPEYSSGWYRFDYWGQGTLVTVSSGGGGSGGGGSGGGGSDIQMTQSPSSLSASVGDRVTISCRASQSIRSYLNWYQQKPGKAPKLLIYATSSLQGGVPSRFSGSGSGTDFTLTISSLQPEDFATYYCQQSYSTPFTFGCGTKVEIKSGGGGSEVQLVESGGGLVQPGGSLKLSCAASGFTFSKYAMNWVREAPGKGLEWVARIRSKYNNYATYYAEAVKDRFTISRDDSKNTVYLQMNNLKTEDTAVYYCVRAENIGKSYISYWAYWGQGTLVTVSSGGGGSGGGGSGGGGSQTVVTQEPSLTVSPGGTVTMTCGSSTGAVTSGNYPNWVQKKPGQAPRGLIGGTKFLAPGTPARFSGSLEGGKAALTLSGVQPEDEAEYYCVLWYSNRWVFGGGTKLTVL

SEQ ID NO: 396 - protein, 1512 aa, Artificial Sequence
  Synthetic
QVQLVQSGAEVKKPGASVKVSCKASGYTFTDYYMHWVRQAPGQCLEWMGWINPNSGGPNYAQKFQGRVTMTRDTSISTAHMELSRLRSDDTAVYYCAREKHAVAGIGFDYWGQGTLVTVSSGGGGSGGGGSGGGGSDIQMTQSPSSVSASVGDRVTITCQASQDISNYLNWYQQKPGKAPKLLIYAASSLESGVPSRFSGSGSGTDFTLTISSLQPEDFATYYCQQANSFPLTFGCGTKVDIKSGGGGSEVQLVESGGGLVQPGGSLKLSCAASGFTFSKYAMNWVRQAPGKGMEWVARIRSKYNNYATYYAEAVKGRFTISRDDSKNTVYLQMNNLKTEDTAVYYCVRAGNFGSSYISYWAYWGQGTLVTVSSGGGGSGGGGSGGGGSQTVVTQEPSLTVSPGGTVTLTCGSSTGAVTSGNYPNWVQKKPGQAPRGLIGGTKFLAPGTPARFSGSLSGGKAALTLSGVQPEDEAEYYCVLWYSNRWVFGGGTKLTVLGGGGSGGGGSGGGGSDKTHTCPPCPAPELLGGPSVFLFPPKPKDTLMISRTPEVTCVVVDVSHEDPEVKFNWYVDGVEVHNAKTKPCEEQYGSTYRCVSVLTVLHQDWLNGKEYKCKVSNKALPAPIEKTISKAKGQPREPQVYTLPPSREEMTKNQVSLTCLVKGFYPSDIAVEWESNGQPENNYKTTPPVLDSDGSFFLYSKLTVDKSRWQQGNVFSCSVMHEALHNHYTQKSLSLSPGKGGGGSGGGGSGGGGSGGGGSGGGGSGGGGSDKTHTCPPCPAPELLGGPSVFLFPPKPKDTLMISRTPEVTCVVVDVSHEDPEVKFNWYVDGVEVHNAKTKPCEEQYGSTYRCVSVLTVLHQDWLNGKEYKCKVSNKALPAPIEKTISKAKGQPREPQVYTLPPSREEMTKNQVSLTCLVKGFYPSDIAVEWESNGQPENNYKTTPPVLDSDGSFFLYSKLTVDKSRWQQGNVFSCSVMHEALHNHYTQKSLSLSPGKGGGGSGGGGSGGGGSQVTLKESGPTLVKPTETLTLTCTVSGFSFRNARMGVSWIRQPPGKCLEWLAHIFSNDEKSYSTSLKSRLTISKDTSKSQVVLTMTNMDPVDTATYFCARVPEYSSGWYRFDYWGQGTLVTVSSGGGGSGGGGSGGGGSDIQMTQSPSSLSASVGDRVTISCRASQSIRSYLNWYQQKPGKAPKLLIYATSSLQGGVPSRFSGSGSGTDFTLTISSLQPEDFATYYCQQSYSTPFTFGCGTKVEIKSGGGGSEVQLVESGGGLVQPGGSLKLSCAASGFTFSKYAMNWVRQAPGKGMEWVARIRSKYNNYATYYAEAVKGRFTISRDDSKNTVYLQMNNLKTEDTAVYYCVRAGNFGSSYISYWAYWGQGTLVTVSSGGGGSGGGGSGGGGSQTVVTQEPSLTVSPGGTVTLTCGSSTGAVTSGNYPNWVQKKPGQAPRGLIGGTKFLAPGTPARFSGSLSGGKAALTLSGVQPEDEAEYYCVLWYSNRWVFGGGTKLTVL

SEQ ID NO: 397 - protein, 1512 aa, Artificial Sequence
  Synthetic
QVQLVQSGAEVKKPGASVKVSCKASGYTFTDYYMHWVRQAPGQCLEWMGWINPNSGGPNYAQKFQGRVTMTRDTSISTAHMELSRLRSDDTAVYYCAREKHAVAGIGFDYWGQGTLVTVSSGGGGSGGGGSGGGGSDIQMTQSPSSVSASVGDRVTITCQASQDISNYLNWYQQKPGKAPKLLIYAASSLESGVPSRFSGSGSGTDFTLTISSLQPEDFATYYCQQANSFPLTFGCGTKVDIKSGGGGSEVQLVESGGGLVQPGGSLKLSCAASGFTFSKYAMNWVRQAPGKGMEWVARIRSKYNNYATYYADAVKGRFTISRDDSKNTVYLQMNNLKTEDTAVYYCVRAGNFGKSYISYFAYWGQGTLVTVSSGGGGSGGGGSGGGGSQTVVTQEPSLTVSPGGTVTLTCGSSTGAVTSGNYPNWVQKKPGQAPRGLIGGTKFLAPGTPARFSGSLSGGKAALTLSGVQPEDEAEYYCVLYYSNRWVFGGGTKLTVLGGGGSGGGGSGGGGSDKTHTCPPCPAPELLGGPSVFLFPPKPKDTLMISRTPEVTCVVVDVSHEDPEVKFNWYVDGVEVHNAKTKPCEEQYGSTYRCVSVLTVLHQDWLNGKEYKCKVSNKALPAPIEKTISKAKGQPREPQVYTLPPSREEMTKNQVSLTCLVKGFYPSDIAVEWESNGQPENNYKTTPPVLDSDGSFFLYSKLTVDKSRWQQGNVFSCSVMHEALHNHYTQKSLSLSPGKGGGGSGGGGSGGGGSGGGGSGGGGSGGGGSDKTHTCPPCPAPELLGGPSVFLFPPKPKDTLMISRTPEVTCVVVDVSHEDPEVKFNWYVDGVEVHNAKTKPCEEQYGSTYRCVSVLTVLHQDWLNGKEYKCKVSNKALPAPIEKTISKAKGQPREPQVYTLPPSREEMTKNQVSLTCLVKGFYPSDIAVEWESNGQPENNYKTTPPVLDSDGSFFLYSKLTVDKSRWQQGNVFSCSVMHEALHNHYTQKSLSLSPGKGGGGSGGGGSGGGGSQVTLKESGPTLVKPTETLTLTCTVSGFSFRNARMGVSWIRQPPGKCLEWLAHIFSNDEKSYSTSLKSRLTISKDTSKSQVVLTMTNMDPVDTATYFCARVPEYSSGWYRFDYWGQGTLVTVSSGGGGSGGGGSGGGGSDIQMTQSPSSLSASVGDRVTISCRASQSIRSYLNWYQQKPGKAPKLLIYATSSLQGGVPSRFSGSGSGTDFTLTISSLQPEDFATYYCQQSYSTPFTFGCGTKVEIKSGGGGSEVQLVESGGGLVQPGGSLKLSCAASGFTFSKYAMNWVRQAPGKGMEWVARIRSKYNNYATYYADAVKGRFTISRDDSKNTVYLQMNNLKTEDTAVYYCVRAGNFGKSYISYFAYWGQGTLVTVSSGGGGSGGGGSGGGGSQTVVTQEPSLTVSPGGTVTLTCGSSTGAVTSGNYPNWVQKKPGQAPRGLIGGTKFLAPGTPARFSGSLSGGKAALTLSGVQPEDEAEYYCVLYYSNRWVFGGGTKLTVL

SEQ ID NO: 398 - protein, 1512 aa, Artificial Sequence
  Synthetic
QVQLVQSGAEVKKPGASVKVSCKASGYTFTDYYMHWVRQAPGQCLEWMGWINPNSGGPNYAQKFQGRVTMTRDTSISTAHMELSRLRSDDTAVYYCAREKHAVAGIGFDYWGQGTLVTVSSGGGGSGGGGSGGGGSDIQMTQSPSSVSASVGDRVTITCQASQDISNYLNWYQQKPGKAPKLLIYAASSLESGVPSRFSGSGSGTDFTLTISSLQPEDFATYYCQQANSFPLTFGCGTKVDIKSGGGGSEVQLVESGGGLVQPGGSLKLSCAASGFTFNKYAMNWVRQAPGKGMEWVARIRSKYNNYATYYAEAVKDRFTISRDDSKNTLYLQMNNLKTEDTAVYYCVRAGNFGKSYISYWAYWGQGTLVTVSSGGGGSGGGGSGGGGSQTVVTQEPSLTVSPGGTVTITCGSSTGAVTSGNYPNWIQKKPGQAPRGLIGGTKFLAPGTPARFSGSLEGGKAALTLSGVQPEDEAEYYCVLWYSNRWVFGSGTKLTVLGGGGSGGGGSGGGGSDKTHTCPPCPAPELLGGPSVFLFPPKPKDTLMISRTPEVTCVVVDVSHEDPEVKFNWYVDGVEVHNAKTKPCEEQYGSTYRCVSVLTVLHQDWLNGKEYKCKVSNKALPAPIEKTISKAKGQPREPQVYTLPPSREEMTKNQVSLTCLVKGFYPSDIAVEWESNGQPENNYKTTPPVLDSDGSFFLYSKLTVDKSRWQQGNVFSCSVMHEALHNHYTQKSLSLSPGKGGGGSGGGGSGGGGSGGGGSGGGGSGGGGSDKTHTCPPCPAPELLGGPSVFLFPPKPKDTLMISRTPEVTCVVVDVSHEDPEVKFNWYVDGVEVHNAKTKPCEEQYGSTYRCVSVLTVLHQDWLNGKEYKCKVSNKALPAPIEKTISKAKGQPREPQVYTLPPSREEMTKNQVSLTCLVKGFYPSDIAVEWESNGQPENNYKTTPPVLDSDGSFFLYSKLTVDKSRWQQGNVFSCSVMHEALHNHYTQKSLSLSPGKGGGGSGGGGSGGGGSQVTLKESGPTLVKPTETLTLTCTVSGFSFRNARMGVSWIRQPPGKCLEWLAHIFSNDEKSYSTSLKSRLTISKDTSKSQVVLTMTNMDPVDTATYFCARVPEYSSGWYRFDYWGQGTLVTVSSGGGGSGGGGSGGGGSDIQMTQSPSSLSASVGDRVTISCRASQSIRSYLNWYQQKPGKAPKLLIYATSSLQGGVPSRFSGSGSGTDFTLTISSLQPEDFATYYCQQSYSTPFTFGCGTKVEIKSGGGGSEVQLVESGGGLVQPGGSLKLSCAASGFTFNKYAMNWVRQAPGKGMEWVARIRSKYNNYATYYAEAVKDRFTISRDDSKNTLYLQMNNLKTEDTAVYYCVRAGNFGKSYISYWAYWGQGTLVTVSSGGGGSGGGGSGGGGSQTVVTQEPSLTVSPGGTVTITCGSSTGAVTSGNYPNWIQKKPGQAPRGLIGGTKFLAPGTPARFSGSLEGGKAALTLSGVQPEDEAEYYCVLWYSNRWVFGSGTKLTVL

SEQ ID NO: 399 - protein, 1512 aa, Artificial Sequence
  Synthetic
QVQLVQSGAEVKKPGASVKVSCKASGYTFTDYYMHWVRQAPGQCLEWMGWINPNSGGPNYAQKFQGRVTMTRDTSISTAHMELSRLRSDDTAVYYCAREKHAVAGIGFDYWGQGTLVTVSSGGGGSGGGGSGGGGSDIQMTQSPSSVSASVGDRVTITCQASQDISNYLNWYQQKPGKAPKLLIYAASSLESGVPSRFSGSGSGTDFTLTISSLQPEDFATYYCQQANSFPLTFGCGTKVDIKSGGGGSEVQLVESGGGLVQPGGSLKLSCAASGFTFNKYAMNWVRQAPGKGMEWVARIRSKYNNYATYYADAVKDRFTISRDDSKNTLYLQMNNLKTEDTAVYYCVRAGNFGSSYISYFAYWGQGTLVTVSSGGGGSGGGGSGGGGSQTVVTQEPSLTVSPGGTVTITCGSSTGAVTSGNYPNWIQKKPGQAPRGLIGGTKFLAPGTPARFSGSLEGGKAALTLSGVQPEDEAEYYCVLYYSNRWVFGSGTKLTVLGGGGSGGGGSGGGGSDKTHTCPPCPAPELLGGPSVFLFPPKPKDTLMISRTPEVTCVVVDVSHEDPEVKFNWYVDGVEVHNAKTKPCEEQYGSTYRCVSVLTVLHQDWLNGKEYKCKVSNKALPAPIEKTISKAKGQPREPQVYTLPPSREEMTKNQVSLTCLVKGFYPSDIAVEWESNGQPENNYKTTPPVLDSDGSFFLYSKLTVDKSRWQQGNVFSCSVMHEALHNHYTQKSLSLSPGKGGGGSGGGGSGGGGSGGGGSGGGGSGGGGSDKTHTCPPCPAPELLGGPSVFLFPPKPKDTLMISRTPEVTCVVVDVSHEDPEVKFNWYVDGVEVHNAKTKPCEEQYGSTYRCVSVLTVLHQDWLNGKEYKCKVSNKALPAPIEKTISKAKGQPREPQVYTLPPSREEMTKNQVSLTCLVKGFYPSDIAVEWESNGQPENNYKTTPPVLDSDGSFFLYSKLTVDKSRWQQGNVFSCSVMHEALHNHYTQKSLSLSPGKGGGGSGGGGSGGGGSQVTLKESGPTLVKPTETLTLTCTVSGFSFRNARMGVSWIRQPPGKCLEWLAHIFSNDEKSYSTSLKSRLTISKDTSKSQVVLTMTNMDPVDTATYFCARVPEYSSGWYRFDYWGQGTLVTVSSGGGGSGGGGSGGGGSDIQMTQSPSSLSASVGDRVTISCRASQSIRSYLNWYQQKPGKAPKLLIYATSSLQGGVPSRFSGSGSGTDFTLTISSLQPEDFATYYCQQSYSTPFTFGCGTKVEIKSGGGGSEVQLVESGGGLVQPGGSLKLSCAASGFTFNKYAMNWVRQAPGKGMEWVARIRSKYNNYATYYADAVKDRFTISRDDSKNTLYLQMNNLKTEDTAVYYCVRAGNFGSSYISYFAYWGQGTLVTVSSGGGGSGGGGSGGGGSQTVVTQEPSLTVSPGGTVTITCGSSTGAVTSGNYPNWIQKKPGQAPRGLIGGTKFLAPGTPARFSGSLEGGKAALTLSGVQPEDEAEYYCVLYYSNRWVFGSGTKLTVL

SEQ ID NO: 400 - protein, 1511 aa, Artificial Sequence
  Synthetic
QVQLVQSGAEVKKPGASVKVSCKASGYTFTDYYMHWVRQAPGQCLEWMGWINPNSGGPNYAQKFQGRVTMTRDTSISTAHMELSRLRSDDTAVYYCAREKHAVAGIGFDYWGQGTLVTVSSGGGGSGGGGSGGGGSDIQMTQSPSSVSASVGDRVTITCQASQDISNYLNWYQQKPGKAPKLLIYAASSLESGVPSRFSGSGSGTDFTLTISSLQPEDFATYYCQQANSFPLTFGCGTKVDIKSGGGGSEVQLVESGGGLVQPGGSLKLSCAASGFTFNKYAMNWVRQAPGKGLEWVARIRSKYNNYATYYADSVKDRFTISRDDSKNTAYLQMNNLKTEDTAVYYCVRHGNFGNSYISYWAYWGQGTLVTVSSGGGGSGGGGSGGGGSQTVVTQEPSLTVSPGGTVTLTCGSSTGAVTSGNYPNWVQQKPGQAPRGLIGGTKFLAPGTPARFSGSLLGGKAALTLSGVQPEDEAEYYCVLWYSNRWVFGGGTKLTVLGGGGSGGGGSGGGGSDKTHTCPPCPAPELLGGPSVFLFPPKPKDTLMISRTPEVTCVVVDVSHEDPEVKFNWYVDGVEVHNAKTKPCEEQYGSTYRCVSVLTVLHQDWLNGKEYKCKVSNKALPAPIEKTISKAKGQPREPQVYTLPPSREEMTKNQVSLTCLVKGFYPSDIAVEWESNGQPENNYKTTPPVLDSDGSFFLYSKLTVDKSRWQQGNVFSCSVMHEALHNHYTQKSLSLSPGKGGGGSGGGGSGGGGSGGGGSGGGGSGGGGSDKTHTCPPCPAPELLGGPSVFLFPPKPKDTLMISRTPEVTCVVVDVSHEDPEVKFNWYVDGVEVHNAKTKPCEEQYGSTYRCVSVLTVLHQDWLNGKEYKCKVSNKALPAPIEKTISKAKGQPREPQVYTLPPSREEMTKNQVSLTCLVKGFYPSDIAVEWESNGQPENNYKTTPPVLDSDGSFFLYSKLTVDKSRWQQGNVFSCSVMHEALHNHYTQKSLSLSPGKGGGGSGGGGSGGGGSEVQLVESGGGLVQPGGSLKLSCAASGFTFNKYAMNWVRQAPGKGLEWVARIRSKYNNYATYYADSVKDRFTISRDDSKNTAYLQMNNLKTEDTAVYYCVRHGNFGNSYISYWAYWGQGTLVTVSSGGGGSGGGGSGGGGSQTVVTQEPSLTVSPGGTVTLTCGSSTGAVTSGNYPNWVQQKPGQAPRGLIGGTKFLAPGTPARFSGSLLGGKAALTLSGVQPEDEAEYYCVLWYSNRWVFGGGTKLTVLGGGGSQVTLKESGPTLVKPTETLTLTCTVSGFSFRNARMGVSWIRQPPGKCLEWLAHIFSNDEKSYSTSLKSRLTISKDTSKSQVVLTMTNMDPVDTATYFCARVPEYSSGWYRFDYWGQGTLVTVSSGGGGSGGGGSGGGGSDIQMTQSPSSLSASVGDRVTISCRASQSIRSYLNWYQQKPGKAPKLLIYATSSLQGGVPSRFSGSGSGTDFTLTISSLQPEDFATYYCQQSYSTPFTFGCGTKVEIK

SEQ ID NO: 401 - protein, 1512 aa, Artificial Sequence
  Synthetic
QVQLVQSGAEVKKPGASVKVSCKASGYTFTDYYMHWVRQAPGQCLEWMGWINPNSGGPNYAQKFQGRVTMTRDTSISTAHMELSRLRSDDTAVYYCAREKHAVAGIGFDYWGQGTLVTVSSGGGGSGGGGSGGGGSDIQMTQSPSSVSASVGDRVTITCQASQDISNYLNWYQQKPGKAPKLLIYAASSLESGVPSRFSGSGSGTDFTLTISSLQPEDFATYYCQQANSFPLTFGCGTKVDIKSGGGGSEVQLVESGGGLVQPGGSLKLSCAASGFTFNKYAMNWVRQAPGKGLEWVARIRSKYNNYATYYADSVKDRFTISRDDSKNTAYLQMNNLKTEDTAVYYCVRHGNFGNSYISYWAYWGQGTLVTVSSGGGGSGGGGSGGGGSQTVVTQEPSLTVSPGGTVTLTCGSSTGAVTSGNYPNWVQQKPGQAPRGLIGGTKFLAPGTPARFSGSLLGGKAALTLSGVQPEDEAEYYCVLWYSNRWVFGGGTKLTVLGGGGSGGGGSGGGGSDKTHTCPPCPAPELLGGPSVFLFPPKPKDTLMISRTPEVTCVVVDVSHEDPEVKFNWYVDGVEVHNAKTKPCEEQYGSTYRCVSVLTVLHQDWLNGKEYKCKVSNKALPAPIEKTISKAKGQPREPQVYTLPPSREEMTKNQVSLTCLVKGFYPSDIAVEWESNGQPENNYKTTPPVLDSDGSFFLYSKLTVDKSRWQQGNVFSCSVMHEALHNHYTQKSLSLSPGKGGGGSGGGGSGGGGSGGGGSGGGGSGGGGSDKTHTCPPCPAPELLGGPSVFLFPPKPKDTLMISRTPEVTCVVVDVSHEDPEVKFNWYVDGVEVHNAKTKPCEEQYGSTYRCVSVLTVLHQDWLNGKEYKCKVSNKALPAPIEKTISKAKGQPREPQVYTLPPSREEMTKNQVSLTCLVKGFYPSDIAVEWESNGQPENNYKTTPPVLDSDGSFFLYSKLTVDKSRWQQGNVFSCSVMHEALHNHYTQKSLSLSPGKGGGGSGGGGSGGGGSQVTLKESGPTLVKPTETLTLTCTVSGFSFRNARMGVSWIRQPPGKCLEWLAHIFSNDEKSYSTSLKSRLTISKDTSKSQVVLTMTNMDPVDTATYFCARVPEYSSGWYRFDYWGQGTLVTVSSGGGGSGGGGSGGGGSDIQMTQSPSSLSASVGDRVTISCRASQSIRSYLNWYQQKPGKAPKLLIYATSSLQGGVPSRFSGSGSGTDFTLTISSLQPEDFATYYCQQSYSTPFTFGCGTKVEIKSGGGGSEVQLVESGGGLVQPGGSLKLSCAASGFTFNKYAMNWVRQAPGKGLEWVARIRSKYNNYATYYADSVKDRFTISRDDSKNTAYLQMNNLKTEDTAVYYCVRHGNFGNSYISYWAYWGQGTLVTVSSGGGGSGGGGSGGGGSQTVVTQEPSLTVSPGGTVTLTCGSSTGAVTSGNYPNWVQQKPGQAPRGLIGGTKFLAPGTPARFSGSLLGGKAALTLSGVQPEDEAEYYCVLWYSNRWVFGGGTKLTVL

SEQ ID NO: 402 - protein, 1512 aa, Artificial Sequence
  Synthetic
QVQLVQSGAEVKKPGASVKVSCKASGYTFTDYYMHWVRQAPGQCLEWMGWINPNSGGPNYAQKFQGRVTMTRDTSISTAHMELSRLRSDDTAVYYCAREKHAVAGIGFDYWGQGTLVTVSSGGGGSGGGGSGGGGSDIQMTQSPSSVSASVGDRVTITCQASQDISNYLNWYQQKPGKAPKLLIYAASSLESGVPSRFSGSGSGTDFTLTISSLQPEDFATYYCQQANSFPLTFGCGTKVDIKSGGGGSEVQLVESGGGLVQPGGSLKLSCAASGFTFNKYAMNWVRQAPGKCLEWVARIRSKYNNYATYYADSVKDRFTISRDDSKNTAYLQMNNLKTEDTAVYYCVRHGNFGNSYISYWAYWGQGTLVTVSSGGGGSGGGGSGGGGSQTVVTQEPSLTVSPGGTVTLTCGSSTGAVTSGNYPNWVQQKPGQAPRGLIGGTKFLAPGTPARFSGSLLGGKAALTLSGVQPEDEAEYYCVLWYSNRWVFGCGTKLTVLGGGGSGGGGSGGGGSDKTHTCPPCPAPELLGGPSVFLFPPKPKDTLMISRTPEVTCVVVDVSHEDPEVKFNWYVDGVEVHNAKTKPCEEQYGSTYRCVSVLTVLHQDWLNGKEYKCKVSNKALPAPIEKTISKAKGQPREPQVYTLPPSREEMTKNQVSLTCLVKGFYPSDIAVEWESNGQPENNYKTTPPVLDSDGSFFLYSKLTVDKSRWQQGNVFSCSVMHEALHNHYTQKSLSLSPGKGGGGSGGGGSGGGGSGGGGSGGGGSGGGGSDKTHTCPPCPAPELLGGPSVFLFPPKPKDTLMISRTPEVTCVVVDVSHEDPEVKFNWYVDGVEVHNAKTKPCEEQYGSTYRCVSVLTVLHQDWLNGKEYKCKVSNKALPAPIEKTISKAKGQPREPQVYTLPPSREEMTKNQVSLTCLVKGFYPSDIAVEWESNGQPENNYKTTPPVLDSDGSFFLYSKLTVDKSRWQQGNVFSCSVMHEALHNHYTQKSLSLSPGKGGGGSGGGGSGGGGSQVTLKESGPTLVKPTETLTLTCTVSGFSFRNARMGVSWIRQPPGKCLEWLAHIFSNDEKSYSTSLKSRLTISKDTSKSQVVLTMTNMDPVDTATYFCARVPEYSSGWYRFDYWGQGTLVTVSSGGGGSGGGGSGGGGSDIQMTQSPSSLSASVGDRVTISCRASQSIRSYLNWYQQKPGKAPKLLIYATSSLQGGVPSRFSGSGSGTDFTLTISSLQPEDFATYYCQQSYSTPFTFGCGTKVEIKSGGGGSEVQLVESGGGLVQPGGSLKLSCAASGFTFNKYAMNWVRQAPGKCLEWVARIRSKYNNYATYYADSVKDRFTISRDDSKNTAYLQMNNLKTEDTAVYYCVRHGNFGNSYISYWAYWGQGTLVTVSSGGGGSGGGGSGGGGSQTVVTQEPSLTVSPGGTVTLTCGSSTGAVTSGNYPNWVQQKPGQAPRGLIGGTKFLAPGTPARFSGSLLGGKAALTLSGVQPEDEAEYYCVLWYSNRWVFGCGTKLTVL

SEQ ID NO: 403 - protein, 1511 aa, Artificial Sequence
  Synthetic
QVQLVQSGAEVKKPGASVKVSCKASGYTFTDYYMHWVRQAPGQCLEWMGWINPNSGGPNYAQKFQGRVTMTRDTSISTAHMELSRLRSDDTAVYYCAREKHAVAGIGFDYWGQGTLVTVSSGGGGSGGGGSGGGGSDIQMTQSPSSVSASVGDRVTITCQASQDISNYLNWYQQKPGKAPKLLIYAASSLESGVPSRFSGSGSGTDFTLTISSLQPEDFATYYCQQANSFPLTFGCGTKVDIKSGGGGSEVQLVESGGGLVQPGGSLKLSCAASGFTFNKYAMNWVRQAPGKCLEWVARIRSKYNNYATYYADSVKDRFTISRDDSKNTAYLQMNNLKTEDTAVYYCVRHGNFGNSYISYWAYWGQGTLVTVSSGGGGSGGGGSGGGGSQTVVTQEPSLTVSPGGTVTLTCGSSTGAVTSGNYPNWVQQKPGQAPRGLIGGTKFLAPGTPARFSGSLLGGKAALTLSGVQPEDEAEYYCVLWYSNRWVFGCGTKLTVLGGGGSGGGGSGGGGSDKTHTCPPCPAPELLGGPSVFLFPPKPKDTLMISRTPEVTCVVVDVSHEDPEVKFNWYVDGVEVHNAKTKPCEEQYGSTYRCVSVLTVLHQDWLNGKEYKCKVSNKALPAPIEKTISKAKGQPREPQVYTLPPSREEMTKNQVSLTCLVKGFYPSDIAVEWESNGQPENNYKTTPPVLDSDGSFFLYSKLTVDKSRWQQGNVFSCSVMHEALHNHYTQKSLSLSPGKGGGGSGGGGSGGGGSGGGGSGGGGSGGGGSDKTHTCPPCPAPELLGGPSVFLFPPKPKDTLMISRTPEVTCVVVDVSHEDPEVKFNWYVDGVEVHNAKTKPCEEQYGSTYRCVSVLTVLHQDWLNGKEYKCKVSNKALPAPIEKTISKAKGQPREPQVYTLPPSREEMTKNQVSLTCLVKGFYPSDIAVEWESNGQPENNYKTTPPVLDSDGSFFLYSKLTVDKSRWQQGNVFSCSVMHEALHNHYTQKSLSLSPGKGGGGSGGGGSGGGGSEVQLVESGGGLVQPGGSLKLSCAASGFTFNKYAMNWVRQAPGKCLEWVARIRSKYNNYATYYADSVKDRFTISRDDSKNTAYLQMNNLKTEDTAVYYCVRHGNFGNSYISYWAYWGQGTLVTVSSGGGGSGGGGSGGGGSQTVVTQEPSLTVSPGGTVTLTCGSSTGAVTSGNYPNWVQQKPGQAPRGLIGGTKFLAPGTPARFSGSLLGGKAALTLSGVQPEDEAEYYCVLWYSNRWVFGCGTKLTVLGGGGSQVTLKESGPTLVKPTETLTLTCTVSGFSFRNARMGVSWIRQPPGKCLEWLAHIFSNDEKSYSTSLKSRLTISKDTSKSQVVLTMTNMDPVDTATYFCARVPEYSSGWYRFDYWGQGTLVTVSSGGGGSGGGGSGGGGSDIQMTQSPSSLSASVGDRVTISCRASQSIRSYLNWYQQKPGKAPKLLIYATSSLQGGVPSRFSGSGSGTDFTLTISSLQPEDFATYYCQQSYSTPFTFGCGTKVEIK

SEQ ID NO: 404 - protein, 1500 aa, Artificial Sequence
  Synthetic
QVQLVQSGAEVKKPGASVKVSCKASGYTFTDYYMHWVRQAPGQCLEWMGWINPNSGGPNYAQKFQGRVTMTRDTSISTAHMELSRLRSDDTAVYYCAREKHAVAGIGFDYWGQGTLVTVSSGGGGSGGGGSGGGGSDIQMTQSPSSVSASVGDRVTITCQASQDISNYLNWYQQKPGKAPKLLIYAASSLESGVPSRFSGSGSGTDFTLTISSLQPEDFATYYCQQANSFPLTFGCGTKVDIKSGGGGSQVTLKESGPTLVKPTETLTLTCTVSGFSFRNARMGVSWIRQPPGKCLEWLAHIFSNDEKSYSTSLKSRLTISKDTSKSQVVLTMTNMDPVDTATYFCARVPEYSSGWYRFDYWGQGTLVTVSSGGGGSGGGGSGGGGSDIQMTQSPSSLSASVGDRVTISCRASQSIRSYLNWYQQKPGKAPKLLIYATSSLQGGVPSRFSGSGSGTDFTLTISSLQPEDFATYYCQQSYSTPFTFGCGTKVEIKSGGGGDKTHTCPPCPAPELLGGPSVFLFPPKPKDTLMISRTPEVTCVVVDVSHEDPEVKFNWYVDGVEVHNAKTKPCEEQYGSTYRCVSVLTVLHQDWLNGKEYKCKVSNKALPAPIEKTISKAKGQPREPQVYTLPPSREEMTKNQVSLTCLVKGFYPSDIAVEWESNGQPENNYKTTPPVLDSDGSFFLYSKLTVDKSRWQQGNVFSCSVMHEALHNHYTQKSLSLSPGKGGGGSGGGGSGGGGSGGGGSGGGGSGGGGSDKTHTCPPCPAPELLGGPSVFLFPPKPKDTLMISRTPEVTCVVVDVSHEDPEVKFNWYVDGVEVHNAKTKPCEEQYGSTYRCVSVLTVLHQDWLNGKEYKCKVSNKALPAPIEKTISKAKGQPREPQVYTLPPSREEMTKNQVSLTCLVKGFYPSDIAVEWESNGQPENNYKTTPPVLDSDGSFFLYSKLTVDKSRWQQGNVFSCSVMHEALHNHYTQKSLSLSPGKGGGGEVQLVESGGGLVQPGGSLKLSCAASGFTFNKYAMNWVRQAPGKCLEWVARIRSKYNNYATYYADSVKDRFTISRDDSKNTAYLQMNNLKTEDTAVYYCVRHGNFGNSYISYWAYWGQGTLVTVSSGGGGSGGGGSGGGGSQTVVTQEPSLTVSPGGTVTLTCGSSTGAVTSGNYPNWVQQKPGQAPRGLIGGTKFLAPGTPARFSGSLLGGKAALTLSGVQPEDEAEYYCVLWYSNRWVFGCGTKLTVLGGGGSGGGGSGGGGSEVQLVESGGGLVQPGGSLKLSCAASGFTFNKYAMNWVRQAPGKCLEWVARIRSKYNNYATYYADSVKDRFTISRDDSKNTAYLQMNNLKTEDTAVYYCVRHGNFGNSYISYWAYWGQGTLVTVSSGGGGSGGGGSGGGGSQTVVTQEPSLTVSPGGTVTLTCGSSTGAVTSGNYPNWVQQKPGQAPRGLIGGTKFLAPGTPARFSGSLLGGKAALTLSGVQPEDEAEYYCVLWYSNRWVFGCGTKLTVL

SEQ ID NO: 405 - protein, 1490 aa, Artificial Sequence
  Synthetic
QVQLVQSGAEVKKPGASVKVSCKASGYTFTDYYMHWVRQAPGQCLEWMGWINPNSGGPNYAQKFQGRVTMTRDTSISTAHMELSRLRSDDTAVYYCAREKHAVAGIGFDYWGQGTLVTVSSGGGGSGGGGSGGGGSDIQMTQSPSSVSASVGDRVTITCQASQDISNYLNWYQQKPGKAPKLLIYAASSLESGVPSRFSGSGSGTDFTLTISSLQPEDFATYYCQQANSFPLTFGCGTKVDIKSGGGGSQVTLKESGPTLVKPTETLTLTCTVSGFSFRNARMGVSWIRQPPGKCLEWLAHIFSNDEKSYSTSLKSRLTISKDTSKSQVVLTMTNMDPVDTATYFCARVPEYSSGWYRFDYWGQGTLVTVSSGGGGSGGGGSGGGGSDIQMTQSPSSLSASVGDRVTISCRASQSIRSYLNWYQQKPGKAPKLLIYATSSLQGGVPSRFSGSGSGTDFTLTISSLQPEDFATYYCQQSYSTPFTFGCGTKVEIKSGGGGSEVQLVESGGGLVQPGGSLKLSCAASGFTFNKYAMNWVRQAPGKCLEWVARIRSKYNNYATYYADSVKDRFTISRDDSKNTAYLQMNNLKTEDTAVYYCVRHGNFGNSYISYWAYWGQGTLVTVSSGGGGSGGGGSGGGGSQTVVTQEPSLTVSPGGTVTLTCGSSTGAVTSGNYPNWVQQKPGQAPRGLIGGTKFLAPGTPARFSGSLLGGKAALTLSGVQPEDEAEYYCVLWYSNRWVFGCGTKLTVLGGGGDKTHTCPPCPAPELLGGPSVFLFPPKPKDTLMISRTPEVTCVVVDVSHEDPEVKFNWYVDGVEVHNAKTKPCEEQYGSTYRCVSVLTVLHQDWLNGKEYKCKVSNKALPAPIEKTISKAKGQPREPQVYTLPPSREEMTKNQVSLTCLVKGFYPSDIAVEWESNGQPENNYKTTPPVLDSDGSFFLYSKLTVDKSRWQQGNVFSCSVMHEALHNHYTQKSLSLSPGKGGGGSGGGGSGGGGSGGGGSGGGGSGGGGSDKTHTCPPCPAPELLGGPSVFLFPPKPKDTLMISRTPEVTCVVVDVSHEDPEVKFNWYVDGVEVHNAKTKPCEEQYGSTYRCVSVLTVLHQDWLNGKEYKCKVSNKALPAPIEKTISKAKGQPREPQVYTLPPSREEMTKNQVSLTCLVKGFYPSDIAVEWESNGQPENNYKTTPPVLDSDGSFFLYSKLTVDKSRWQQGNVFSCSVMHEALHNHYTQKSLSLSPGKGGGGEVQLVESGGGLVQPGGSLKLSCAASGFTFNKYAMNWVRQAPGKCLEWVARIRSKYNNYATYYADSVKDRFTISRDDSKNTAYLQMNNLKTEDTAVYYCVRHGNFGNSYISYWAYWGQGTLVTVSSGGGGSGGGGSGGGGSQTVVTQEPSLTVSPGGTVTLTCGSSTGAVTSGNYPNWVQQKPGQAPRGLIGGTKFLAPGTPARFSGSLLGGKAALTLSGVQPEDEAEYYCVLWYSNRWVFGCGTKLTVL

SEQ ID NO: 406 - protein, 1501 aa, Artificial Sequence
  Synthetic
QVQLVQSGAEVKKPGASVKVSCKASGYTFTDYYMHWVRQAPGQCLEWMGWINPNSGGPNYAQKFQGRVTMTRDTSISTAHMELSRLRSDDTAVYYCAREKHAVAGIGFDYWGQGTLVTVSSGGGGSGGGGSGGGGSDIQMTQSPSSVSASVGDRVTITCQASQDISNYLNWYQQKPGKAPKLLIYAASSLESGVPSRFSGSGSGTDFTLTISSLQPEDFATYYCQQANSFPLTFGCGTKVDIKSGGGGSQVTLKESGPTLVKPTETLTLTCTVSGFSFRNARMGVSWIRQPPGKCLEWLAHIFSNDEKSYSTSLKSRLTISKDTSKSQVVLTMTNMDPVDTATYFCARVPEYSSGWYRFDYWGQGTLVTVSSGGGGSGGGGSGGGGSDIQMTQSPSSLSASVGDRVTISCRASQSIRSYLNWYQQKPGKAPKLLIYATSSLQGGVPSRFSGSGSGTDFTLTISSLQPEDFATYYCQQSYSTPFTFGCGTKVEIKSGGGGSEVQLVESGGGLVQPGGSLKLSCAASGFTFNKYAMNWVRQAPGKCLEWVARIRSKYNNYATYYADSVKDRFTISRDDSKNTAYLQMNNLKTEDTAVYYCVRHGNFGNSYISYWAYWGQGTLVTVSSGGGGSGGGGSGGGGSQTVVTQEPSLTVSPGGTVTLTCGSSTGAVTSGNYPNWVQQKPGQAPRGLIGGTKFLAPGTPARFSGSLLGGKAALTLSGVQPEDEAEYYCVLWYSNRWVFGCGTKLTVLGGGGSGGGGSGGGGSEVQLVESGGGLVQPGGSLKLSCAASGFTFNKYAMNWVRQAPGKCLEWVARIRSKYNNYATYYADSVKDRFTISRDDSKNTAYLQMNNLKTEDTAVYYCVRHGNFGNSYISYWAYWGQGTLVTVSSGGGGSGGGGSGGGGSQTVVTQEPSLTVSPGGTVTLTCGSSTGAVTSGNYPNWVQQKPGQAPRGLIGGTKFLAPGTPARFSGSLLGGKAALTLSGVQPEDEAEYYCVLWYSNRWVFGCGTKLTVLGGGGDKTHTCPPCPAPELLGGPSVFLFPPKPKDTLMISRTPEVTCVVVDVSHEDPEVKFNWYVDGVEVHNAKTKPCEEQYGSTYRCVSVLTVLHQDWLNGKEYKCKVSNKALPAPIEKTISKAKGQPREPQVYTLPPSREEMTKNQVSLTCLVKGFYPSDIAVEWESNGQPENNYKTTPPVLDSDGSFFLYSKLTVDKSRWQQGNVFSCSVMHEALHNHYTQKSLSLSPGKGGGGSGGGGSGGGGSGGGGSGGGGSGGGGSDKTHTCPPCPAPELLGGPSVFLFPPKPKDTLMISRTPEVTCVVVDVSHEDPEVKFNWYVDGVEVHNAKTKPCEEQYGSTYRCVSVLTVLHQDWLNGKEYKCKVSNKALPAPIEKTISKAKGQPREPQVYTLPPSREEMTKNQVSLTCLVKGFYPSDIAVEWESNGQPENNYKTTPPVLDSDGSFFLYSKLTVDKSRWQQGNVFSCSVMHEALHNHYTQKSLSLSPGK

SEQ ID NO: 407 - protein, 1490 aa, Artificial Sequence
  Synthetic
QVQLVQSGAEVKKPGASVKVSCKASGYTFTDYYMHWVRQAPGQCLEWMGWINPNSGGPNYAQKFQGRVTMTRDTSISTAHMELSRLRSDDTAVYYCAREKHAVAGIGFDYWGQGTLVTVSSGGGGSGGGGSGGGGSDIQMTQSPSSVSASVGDRVTITCQASQDISNYLNWYQQKPGKAPKLLIYAASSLESGVPSRFSGSGSGTDFTLTISSLQPEDFATYYCQQANSFPLTFGCGTKVDIKSGGGGSEVQLVESGGGLVQPGGSLKLSCAASGFTFNKYAMNWVRQAPGKCLEWVARIRSKYNNYATYYADSVKDRFTISRDDSKNTAYLQMNNLKTEDTAVYYCVRHGNFGNSYISYWAYWGQGTLVTVSSGGGGSGGGGSGGGGSQTVVTQEPSLTVSPGGTVTLTCGSSTGAVTSGNYPNWVQQKPGQAPRGLIGGTKFLAPGTPARFSGSLLGGKAALTLSGVQPEDEAEYYCVLWYSNRWVFGCGTKLTVLGGGGDKTHTCPPCPAPELLGGPSVFLFPPKPKDTLMISRTPEVTCVVVDVSHEDPEVKFNWYVDGVEVHNAKTKPCEEQYGSTYRCVSVLTVLHQDWLNGKEYKCKVSNKALPAPIEKTISKAKGQPREPQVYTLPPSREEMTKNQVSLTCLVKGFYPSDIAVEWESNGQPENNYKTTPPVLDSDGSFFLYSKLTVDKSRWQQGNVFSCSVMHEALHNHYTQKSLSLSPGKGGGGSGGGGSGGGGSGGGGSGGGGSGGGGSDKTHTCPPCPAPELLGGPSVFLFPPKPKDTLMISRTPEVTCVVVDVSHEDPEVKFNWYVDGVEVHNAKTKPCEEQYGSTYRCVSVLTVLHQDWLNGKEYKCKVSNKALPAPIEKTISKAKGQPREPQVYTLPPSREEMTKNQVSLTCLVKGFYPSDIAVEWESNGQPENNYKTTPPVLDSDGSFFLYSKLTVDKSRWQQGNVFSCSVMHEALHNHYTQKSLSLSPGKGGGGQVTLKESGPTLVKPTETLTLTCTVSGFSFRNARMGVSWIRQPPGKCLEWLAHIFSNDEKSYSTSLKSRLTISKDTSKSQVVLTMTNMDPVDTATYFCARVPEYSSGWYRFDYWGQGTLVTVSSGGGGSGGGGSGGGGSDIQMTQSPSSLSASVGDRVTISCRASQSIRSYLNWYQQKPGKAPKLLIYATSSLQGGVPSRFSGSGSGTDFTLTISSLQPEDFATYYCQQSYSTPFTFGCGTKVEIKSGGGGSEVQLVESGGGLVQPGGSLKLSCAASGFTFNKYAMNWVRQAPGKCLEWVARIRSKYNNYATYYADSVKDRFTISRDDSKNTAYLQMNNLKTEDTAVYYCVRHGNFGNSYISYWAYWGQGTLVTVSSGGGGSGGGGSGGGGSQTVVTQEPSLTVSPGGTVTLTCGSSTGAVTSGNYPNWVQQKPGQAPRGLIGGTKFLAPGTPARFSGSLLGGKAALTLSGVQPEDEAEYYCVLWYSNRWVFGCGTKLTVL

SEQ ID NO: 408 - protein, 1499 aa, Artificial Sequence
  Synthetic
QVQLVQSGAEVKKPGASVKVSCKASGYTFTDYYMHWVRQAPGQCLEWMGWINPNSGGPNYAQKFQGRVTMTRDTSISTAHMELSRLRSDDTAVYYCAREKHAVAGIGFDYWGQGTLVTVSSGGGGSGGGGSGGGGSDIQMTQSPSSVSASVGDRVTITCQASQDISNYLNWYQQKPGKAPKLLIYAASSLESGVPSRFSGSGSGTDFTLTISSLQPEDFATYYCQQANSFPLTFGCGTKVDIKGGGGDKTHTCPPCPAPELLGGPSVFLFPPKPKDTLMISRTPEVTCVVVDVSHEDPEVKFNWYVDGVEVHNAKTKPCEEQYGSTYRCVSVLTVLHQDWLNGKEYKCKVSNKALPAPIEKTISKAKGQPREPQVYTLPPSREEMTKNQVSLTCLVKGFYPSDIAVEWESNGQPENNYKTTPPVLDSDGSFFLYSKLTVDKSRWQQGNVFSCSVMHEALHNHYTQKSLSLSPGKGGGGSGGGGSGGGGSGGGGSGGGGSGGGGSDKTHTCPPCPAPELLGGPSVFLFPPKPKDTLMISRTPEVTCVVVDVSHEDPEVKFNWYVDGVEVHNAKTKPCEEQYGSTYRCVSVLTVLHQDWLNGKEYKCKVSNKALPAPIEKTISKAKGQPREPQVYTLPPSREEMTKNQVSLTCLVKGFYPSDIAVEWESNGQPENNYKTTPPVLDSDGSFFLYSKLTVDKSRWQQGNVFSCSVMHEALHNHYTQKSLSLSPGKGGGGQVTLKESGPTLVKPTETLTLTCTVSGFSFRNARMGVSWIRQPPGKCLEWLAHIFSNDEKSYSTSLKSRLTISKDTSKSQVVLTMTNMDPVDTATYFCARVPEYSSGWYRFDYWGQGTLVTVSSGGGGSGGGGSGGGGSDIQMTQSPSSLSASVGDRVTISCRASQSIRSYLNWYQQKPGKAPKLLIYATSSLQGGVPSRFSGSGSGTDFTLTISSLQPEDFATYYCQQSYSTPFTFGCGTKVEIKSGGGGSEVQLVESGGGLVQPGGSLKLSCAASGFTFNKYAMNWVRQAPGKCLEWVARIRSKYNNYATYYADSVKDRFTISRDDSKNTAYLQMNNLKTEDTAVYYCVRHGNFGNSYISYWAYWGQGTLVTVSSGGGGSGGGGSGGGGSQTVVTQEPSLTVSPGGTVTLTCGSSTGAVTSGNYPNWVQQKPGQAPRGLIGGTKFLAPGTPARFSGSLLGGKAALTLSGVQPEDEAEYYCVLWYSNRWVFGCGTKLTVLGGGGSGGGGSGGGGSEVQLVESGGGLVQPGGSLKLSCAASGFTFNKYAMNWVRQAPGKCLEWVARIRSKYNNYATYYADSVKDRFTISRDDSKNTAYLQMNNLKTEDTAVYYCVRHGNFGNSYISYWAYWGQGTLVTVSSGGGGSGGGGSGGGGSQTVVTQEPSLTVSPGGTVTLTCGSSTGAVTSGNYPNWVQQKPGQAPRGLIGGTKFLAPGTPARFSGSLLGGKAALTLSGVQPEDEAEYYCVLWYSNRWVFGCGTKLTVL

SEQ ID NO: 409 - protein, 1582 aa, Artificial Sequence
  Synthetic
QVQLVQSGAEVKKPGASVKVSCKASGYTFTDYYMHWVRQAPGQCLEWMGWINPNSGGPNYAQKFQGRVTMTRDTSISTAHMELSRLRSDDTAVYYCAREKHAVAGIGFDYWGQGTLVTVSSGGGGSGGGGSGGGGSDIQMTQSPSSVSASVGDRVTITCQASQDISNYLNWYQQKPGKAPKLLIYAASSLESGVPSRFSGSGSGTDFTLTISSLQPEDFATYYCQQANSFPLTFGCGTKVDIKSGEAAAKEAAAKEAAAKEAAAKEAAAKEAAAKEAAAKEAAAKEAAAKEAAAKEVQLVESGGGLVQPGGSLKLSCAASGFTFNKYAMNWVRQAPGKCLEWVARIRSKYNNYATYYADSVKDRFTISRDDSKNTAYLQMNNLKTEDTAVYYCVRHGNFGNSYISYWAYWGQGTLVTVSSGGGGSGGGGSGGGGSQTVVTQEPSLTVSPGGTVTLTCGSSTGAVTSGNYPNWVQQKPGQAPRGLIGGTKFLAPGTPARFSGSLLGGKAALTLSGVQPEDEAEYYCVLWYSNRWVFGCGTKLTVLGGGGDKTHTCPPCPAPELLGGPSVFLFPPKPKDTLMISRTPEVTCVVVDVSHEDPEVKFNWYVDGVEVHNAKTKPCEEQYGSTYRCVSVLTVLHQDWLNGKEYKCKVSNKALPAPIEKTISKAKGQPREPQVYTLPPSREEMTKNQVSLTCLVKGFYPSDIAVEWESNGQPENNYKTTPPVLDSDGSFFLYSKLTVDKSRWQQGNVFSCSVMHEALHNHYTQKSLSLSPGKGGGGSGGGGSGGGGSGGGGSGGGGSGGGGSDKTHTCPPCPAPELLGGPSVFLFPPKPKDTLMISRTPEVTCVVVDVSHEDPEVKFNWYVDGVEVHNAKTKPCEEQYGSTYRCVSVLTVLHQDWLNGKEYKCKVSNKALPAPIEKTISKAKGQPREPQVYTLPPSREEMTKNQVSLTCLVKGFYPSDIAVEWESNGQPENNYKTTPPVLDSDGSFFLYSKLTVDKSRWQQGNVFSCSVMHEALHNHYTQKSLSLSPGKGGGGQVTLKESGPTLVKPTETLTLTCTVSGFSFRNARMGVSWIRQPPGKCLEWLAHIFSNDEKSYSTSLKSRLTISKDTSKSQVVLTMTNMDPVDTATYFCARVPEYSSGWYRFDYWGQGTLVTVSSGGGGSGGGGSGGGGSDIQMTQSPSSLSASVGDRVTISCRASQSIRSYLNWYQQKPGKAPKLLIYATSSLQGGVPSRFSGSGSGTDFTLTISSLQPEDFATYYCQQSYSTPFTFGCGTKVEIKSGEAAAKEAAAKEAAAKEAAAKEAAAKEAAAKEAAAKEAAAKEAAAKEAAAKEVQLVESGGGLVQPGGSLKLSCAASGFTFNKYAMNWVRQAPGKCLEWVARIRSKYNNYATYYADSVKDRFTISRDDSKNTAYLQMNNLKTEDTAVYYCVRHGNFGNSYISYWAYWGQGTLVTVSSGGGGSGGGGSGGGGSQTVVTQEPSLTVSPGGTVTLTCGSSTGAVTSGNYPNWVQQKPGQAPRGLIGGTKFLAPGTPARFSGSLLGGKAALTLSGVQPEDEAEYYCVLWYSNRWVFGCGTKLTVL

SEQ ID NO: 410 - protein, 1510 aa, Artificial Sequence
  Synthetic
QVQLVQSGAEVKKPGASVKVSCKASGYTFTDYYMHWVRQAPGQCLEWMGWINPNSGGPNYAQKFQGRVTMTRDTSISTAHMELSRLRSDDTAVYYCAREKHAVAGIGFDYWGQGTLVTVSSGGGGSGGGGSGGGGSDIQMTQSPSSVSASVGDRVTITCQASQDISNYLNWYQQKPGKAPKLLIYAASSLESGVPSRFSGSGSGTDFTLTISSLQPEDFATYYCQQANSFPLTFGCGTKVDIKSGGGGSGGGGSGGGGSEVQLVESGGGLVQPGGSLKLSCAASGFTFNKYAMNWVRQAPGKCLEWVARIRSKYNNYATYYADSVKDRFTISRDDSKNTAYLQMNNLKTEDTAVYYCVRHGNFGNSYISYWAYWGQGTLVTVSSGGGGSGGGGSGGGGSQTVVTQEPSLTVSPGGTVTLTCGSSTGAVTSGNYPNWVQQKPGQAPRGLIGGTKFLAPGTPARFSGSLLGGKAALTLSGVQPEDEAEYYCVLWYSNRWVFGCGTKLTVLGGGGDKTHTCPPCPAPELLGGPSVFLFPPKPKDTLMISRTPEVTCVVVDVSHEDPEVKFNWYVDGVEVHNAKTKPCEEQYGSTYRCVSVLTVLHQDWLNGKEYKCKVSNKALPAPIEKTISKAKGQPREPQVYTLPPSREEMTKNQVSLTCLVKGFYPSDIAVEWESNGQPENNYKTTPPVLDSDGSFFLYSKLTVDKSRWQQGNVFSCSVMHEALHNHYTQKSLSLSPGKGGGGSGGGGSGGGGSGGGGSGGGGSGGGGSDKTHTCPPCPAPELLGGPSVFLFPPKPKDTLMISRTPEVTCVVVDVSHEDPEVKFNWYVDGVEVHNAKTKPCEEQYGSTYRCVSVLTVLHQDWLNGKEYKCKVSNKALPAPIEKTISKAKGQPREPQVYTLPPSREEMTKNQVSLTCLVKGFYPSDIAVEWESNGQPENNYKTTPPVLDSDGSFFLYSKLTVDKSRWQQGNVFSCSVMHEALHNHYTQKSLSLSPGKGGGGQVTLKESGPTLVKPTETLTLTCTVSGFSFRNARMGVSWIRQPPGKCLEWLAHIFSNDEKSYSTSLKSRLTISKDTSKSQVVLTMTNMDPVDTATYFCARVPEYSSGWYRFDYWGQGTLVTVSSGGGGSGGGGSGGGGSDIQMTQSPSSLSASVGDRVTISCRASQSIRSYLNWYQQKPGKAPKLLIYATSSLQGGVPSRFSGSGSGTDFTLTISSLQPEDFATYYCQQSYSTPFTFGCGTKVEIKSGGGGSGGGGSGGGGSEVQLVESGGGLVQPGGSLKLSCAASGFTFNKYAMNWVRQAPGKCLEWVARIRSKYNNYATYYADSVKDRFTISRDDSKNTAYLQMNNLKTEDTAVYYCVRHGNFGNSYISYWAYWGQGTLVTVSSGGGGSGGGGSGGGGSQTVVTQEPSLTVSPGGTVTLTCGSSTGAVTSGNYPNWVQQKPGQAPRGLIGGTKFLAPGTPARFSGSLLGGKAALTLSGVQPEDEAEYYCVLWYSNRWVFGCGTKLTVL

SEQ ID NO: 411 - protein, 994 aa, Artificial Sequence
  Synthetic
EVQLLESGGGLVQPGGSLRLSCAASGFSFSSYPINWVRQAPGKGLEWVGVIWTGGGTNYASSVKGRFTISRDNSKNTVYLQMNSLRAEDTAVYYCAKSRGVYDFDGRGAMDYWGQGTLVTVSSGGGGSGGGGSGGGGSDIVMTQSPDSLAVSLGERATINCKSSQSLLYSSNQKNYFAWYQQKPGQPPKLLIYWASTRESGVPDRFSGSGSGTDFTLTISSLQAEDVAVYYCQQYYSYPYTFGQGTKLEIKSGGGGSEVQLVESGGGLVQPGGSLKLSCAASGFTFNKYAMNWVRQAPGKGLEWVARIRSKYNNYATYYADSVKDRFTISRDDSKNTAYLQMNNLKTEDTAVYYCVRHGNFGNSYISYWAYWGQGTLVTVSSGGGGSGGGGSGGGGSQTVVTQEPSLTVSPGGTVTLTCGSSTGAVTSGNYPNWVQQKPGQAPRGLIGGTKFLAPGTPARFSGSLLGGKAALTLSGVQPEDEAEYYCVLWYSNRWVFGGGTKLTVLGGGGDKTHTCPPCPAPELLGGPSVFLFPPKPKDTLMISRTPEVTCVVVDVSHEDPEVKFNWYVDGVEVHNAKTKPCEEQYGSTYRCVSVLTVLHQDWLNGKEYKCKVSNKALPAPIEKTISKAKGQPREPQVYTLPPSREEMTKNQVSLTCLVKGFYPSDIAVEWESNGQPENNYKTTPPVLDSDGSFFLYSKLTVDKSRWQQGNVFSCSVMHEALHNHYTQKSLSLSPGKGGGGSGGGGSGGGGSGGGGSGGGGSGGGGSDKTHTCPPCPAPELLGGPSVFLFPPKPKDTLMISRTPEVTCVVVDVSHEDPEVKFNWYVDGVEVHNAKTKPCEEQYGSTYRCVSVLTVLHQDWLNGKEYKCKVSNKALPAPIEKTISKAKGQPREPQVYTLPPSREEMTKNQVSLTCLVKGFYPSDIAVEWESNGQPENNYKTTPPVLDSDGSFFLYSKLTVDKSRWQQGNVFSCSVMHEALHNHYTQKSLSLSPGK

SEQ ID NO: 412 - protein, 986 aa, Artificial Sequence
  Synthetic
QVQLVQSGAEVKKPGASVKVSCKASGYTFTDYYMHWVRQAPGQCLEWMGWINPNSGGPNYAQKFQGRVTMTRDTSISTAHMELSRLRSDDTAVYYCAREKHAVAGIGFDYWGQGTLVTVSSGGGGSGGGGSGGGGSDIQMTQSPSSVSASVGDRVTITCQASQDISNYLNWYQQKPGKAPKLLIYAASSLESGVPSRFSGSGSGTDFTLTISSLQPEDFATYYCQQANSFPLTFGCGTKVDIKSGGGGSEVQLVESGGGLVQPGGSLKLSCAASGFTFNKYAMNWVRQAPGKGLEWVARIRSKYNNYATYYADSVKDRFTISRDDSKNTAYLQMNNLKTEDTAVYYCVRHGNFGNSYISYWAYWGQGTLVTVSSGGGGSGGGGSGGGGSQTVVTQEPSLTVSPGGTVTLTCGSSTGAVTSGNYPNWVQQKPGQAPRGLIGGTKFLAPGTPARFSGSLLGGKAALTLSGVQPEDEAEYYCVLWYSNRWVFGGGTKLTVLGGGGDKTHTCPPCPAPELLGGPSVFLFPPKPKDTLMISRTPEVTCVVVDVSHEDPEVKFNWYVDGVEVHNAKTKPCEEQYGSTYRCVSVLTVLHQDWLNGKEYKCKVSNKALPAPIEKTISKAKGQPREPQVYTLPPSREEMTKNQVSLTCLVKGFYPSDIAVEWESNGQPENNYKTTPPVLDSDGSFFLYSKLTVDKSRWQQGNVFSCSVMHEALHNHYTQKSLSLSPGKGGGGSGGGGSGGGGSGGGGSGGGGSGGGGSDKTHTCPPCPAPELLGGPSVFLFPPKPKDTLMISRTPEVTCVVVDVSHEDPEVKFNWYVDGVEVHNAKTKPCEEQYGSTYRCVSVLTVLHQDWLNGKEYKCKVSNKALPAPIEKTISKAKGQPREPQVYTLPPSREEMTKNQVSLTCLVKGFYPSDIAVEWESNGQPENNYKTTPPVLDSDGSFFLYSKLTVDKSRWQQGNVFSCSVMHEALHNHYTQKSLSLSPGK

SEQ ID NO: 413 - protein, 1235 aa, Artificial Sequence
  Synthetic
QVQLVQSGAEVKKPGASVKVSCKASGYTFTDYYMHWVRQAPGQCLEWMGWINPNSGGPNYAQKFQGRVTMTRDTSISTAHMELSRLRSDDTAVYYCAREKHAVAGIGFDYWGQGTLVTVSSGGGGSGGGGSGGGGSDIQMTQSPSSVSASVGDRVTITCQASQDISNYLNWYQQKPGKAPKLLIYAASSLESGVPSRFSGSGSGTDFTLTISSLQPEDFATYYCQQANSFPLTFGCGTKVDIKSGGGGSQVQLVESGGGLVKPGESLRLSCAASGFTFSDYYMYWVRQAPGKGLEWVAIISDGGYYTYYSDIIKGRFTISRDNAKNSLYLQMNSLKAEDTAVYYCARGFPLLRHGAMDYWGQGTLVTVSSGGGGSGGGGSGGGGSDIQMTQSPSSLSASVGDRVTITCKASQNVDTNVAWYQQKPGQAPKSLIYSASYRYSDVPSRFSGSASGTDFTLTISSVQSEDFATYYCQQYDSYPYTFGGGTKLEIKSGGGGSEVQLVESGGGLVQPGGSLKLSCAASGFTFNKYAMNWVRQAPGKGLEWVARIRSKYNNYATYYADSVKDRFTISRDDSKNTAYLQMNNLKTEDTAVYYCVRHGNFGNSYISYWAYWGQGTLVTVSSGGGGSGGGGSGGGGSQTVVTQEPSLTVSPGGTVTLTCGSSTGAVTSGNYPNWVQQKPGQAPRGLIGGTKFLAPGTPARFSGSLLGGKAALTLSGVQPEDEAEYYCVLWYSNRWVFGGGTKLTVLGGGGDKTHTCPPCPAPELLGGPSVFLFPPKPKDTLMISRTPEVTCVVVDVSHEDPEVKFNWYVDGVEVHNAKTKPCEEQYGSTYRCVSVLTVLHQDWLNGKEYKCKVSNKALPAPIEKTISKAKGQPREPQVYTLPPSREEMTKNQVSLTCLVKGFYPSDIAVEWESNGQPENNYKTTPPVLDSDGSFFLYSKLTVDKSRWQQGNVFSCSVMHEALHNHYTQKSLSLSPGKGGGGSGGGGSGGGGSGGGGSGGGGSGGGGSDKTHTCPPCPAPELLGGPSVFLFPPKPKDTLMISRTPEVTCVVVDVSHEDPEVKFNWYVDGVEVHNAKTKPCEEQYGSTYRCVSVLTVLHQDWLNGKEYKCKVSNKALPAPIEKTISKAKGQPREPQVYTLPPSREEMTKNQVSLTCLVKGFYPSDIAVEWESNGQPENNYKTTPPVLDSDGSFFLYSKLTVDKSRWQQGNVFSCSVMHEALHNHYTQKSLSLSPGK

SEQ ID NO: 414 - protein, 994 aa, Artificial Sequence
  Synthetic
QVQLVESGGGVVQSGRSLRLSCAASGFTFRNYGMHWVRQAPGKCLEWVAVIWYDGSDKYYADSVRGRFTISRDNSKNTLYLQMNSLRAEDTAVYYCARDGYDILTGNPRDFDYWGQGTLVTVSSGGGGSGGGGSGGGGSDTVMTQTPLSSHVTLGQPASISCRSSQSLVHSDGNTYLSWLQQRPGQPPRLLIYRISRRFSGVPDRFSGSGAGTDFTLEISRVEAEDVGVYYCMQSTHVPRTFGCGTKVEIKSGGGGSEVQLVESGGGLVQPGGSLKLSCAASGFTFNKYAMNWVRQAPGKGLEWVARIRSKYNNYATYYADSVKDRFTISRDDSKNTAYLQMNNLKTEDTAVYYCVRHGNFGNSYISYWAYWGQGTLVTVSSGGGGSGGGGSGGGGSQTVVTQEPSLTVSPGGTVTLTCGSSTGAVTSGNYPNWVQQKPGQAPRGLIGGTKFLAPGTPARFSGSLLGGKAALTLSGVQPEDEAEYYCVLWYSNRWVFGGGTKLTVLGGGGDKTHTCPPCPAPELLGGPSVFLFPPKPKDTLMISRTPEVTCVVVDVSHEDPEVKFNWYVDGVEVHNAKTKPCEEQYGSTYRCVSVLTVLHQDWLNGKEYKCKVSNKALPAPIEKTISKAKGQPREPQVYTLPPSREEMTKNQVSLTCLVKGFYPSDIAVEWESNGQPENNYKTTPPVLDSDGSFFLYSKLTVDKSRWQQGNVFSCSVMHEALHNHYTQKSLSLSPGKGGGGSGGGGSGGGGSGGGGSGGGGSGGGGSDKTHTCPPCPAPELLGGPSVFLFPPKPKDTLMISRTPEVTCVVVDVSHEDPEVKFNWYVDGVEVHNAKTKPCEEQYGSTYRCVSVLTVLHQDWLNGKEYKCKVSNKALPAPIEKTISKAKGQPREPQVYTLPPSREEMTKNQVSLTCLVKGFYPSDIAVEWESNGQPENNYKTTPPVLDSDGSFFLYSKLTVDKSRWQQGNVFSCSVMHEALHNHYTQKSLSLSPGK

SEQ ID NO: 415 - protein, 990 aa, Artificial Sequence
  Synthetic
ELVMTQSPSSLTVTAGEKVTMSCKSSQSLLNSGNQKNYLTWYQQKPGQPPKLLIYWASTRESGVPDRFTGSGSGTDFTLTISSVQAEDLAVYYCQNDYSYPLTFGAGTKLEIKGGGGSGGGGSGGGGSEVQLLEQSGAELVRPGTSVKISCKASGYAFTNYWLGWVKQRPGHGLEWIGDIFPGSGNIHYNEKFKGKATLTADKSSSTAYMQLSSLTFEDSAVYFCARLRNWDEPMDYWGQGTTVTVSSGGGGSEVQLVESGGGLVQPGGSLKLSCAASGFTFNKYAMNWVRQAPGKGLEWVARIRSKYNNYATYYADSVKDRFTISRDDSKNTAYLQMNNLKTEDTAVYYCVRHGNFGNSYISYWAYWGQGTLVTVSSGGGGSGGGGSGGGGSQTVVTQEPSLTVSPGGTVTLTCGSSTGAVTSGNYPNWVQQKPGQAPRGLIGGTKFLAPGTPARFSGSLLGGKAALTLSGVQPEDEAEYYCVLWYSNRWVFGGGTKLTVLGGGGDKTHTCPPCPAPELLGGPSVFLFPPKPKDTLMISRTPEVTCVVVDVSHEDPEVKFNWYVDGVEVHNAKTKPCEEQYGSTYRCVSVLTVLHQDWLNGKEYKCKVSNKALPAPIEKTISKAKGQPREPQVYTLPPSREEMTKNQVSLTCLVKGFYPSDIAVEWESNGQPENNYKTTPPVLDSDGSFFLYSKLTVDKSRWQQGNVFSCSVMHEALHNHYTQKSLSLSPGKGGGGSGGGGSGGGGSGGGGSGGGGSGGGGSDKTHTCPPCPAPELLGGPSVFLFPPKPKDTLMISRTPEVTCVVVDVSHEDPEVKFNWYVDGVEVHNAKTKPCEEQYGSTYRCVSVLTVLHQDWLNGKEYKCKVSNKALPAPIEKTISKAKGQPREPQVYTLPPSREEMTKNQVSLTCLVKGFYPSDIAVEWESNGQPENNYKTTPPVLDSDGSFFLYSKLTVDKSRWQQGNVFSCSVMHEALHNHYTQKSLSLSPGK

SEQ ID NO: 416 - protein, 988 aa, Artificial Sequence
  Synthetic
QVTLKESGPTLVKPTETLTLTCTVSGFSFRNARMGVSWIRQPPGKCLEWLAHIFSNDEKSYSTSLKSRLTISKDTSKSQVVLTMTNMDPVDTATYFCARVPEYSSGWYRFDYWGQGTLVTVSSGGGGSGGGGSGGGGSDIQMTQSPSSLSASVGDRVTISCRASQSIRSYLNWYQQKPGKAPKLLIYATSSLQGGVPSRFSGSGSGTDFTLTISSLQPEDFATYYCQQSYSTPFTFGCGTKVEIKSGGGGSEVQLVESGGGLVQPGGSLKLSCAASGFTFNKYAMNWVRQAPGKGLEWVARIRSKYNNYATYYADSVKDRFTISRDDSKNTAYLQMNNLKTEDTAVYYCVRHGNFGNSYISYWAYWGQGTLVTVSSGGGGSGGGGSGGGGSQTVVTQEPSLTVSPGGTVTLTCGSSTGAVTSGNYPNWVQQKPGQAPRGLIGGTKFLAPGTPARFSGSLLGGKAALTLSGVQPEDEAEYYCVLWYSNRWVFGGGTKLTVLGGGGDKTHTCPPCPAPELLGGPSVFLFPPKPKDTLMISRTPEVTCVVVDVSHEDPEVKFNWYVDGVEVHNAKTKPCEEQYGSTYRCVSVLTVLHQDWLNGKEYKCKVSNKALPAPIEKTISKAKGQPREPQVYTLPPSREEMTKNQVSLTCLVKGFYPSDIAVEWESNGQPENNYKTTPPVLDSDGSFFLYSKLTVDKSRWQQGNVFSCSVMHEALHNHYTQKSLSLSPGKGGGGSGGGGSGGGGSGGGGSGGGGSGGGGSDKTHTCPPCPAPELLGGPSVFLFPPKPKDTLMISRTPEVTCVVVDVSHEDPEVKFNWYVDGVEVHNAKTKPCEEQYGSTYRCVSVLTVLHQDWLNGKEYKCKVSNKALPAPIEKTISKAKGQPREPQVYTLPPSREEMTKNQVSLTCLVKGFYPSDIAVEWESNGQPENNYKTTPPVLDSDGSFFLYSKLTVDKSRWQQGNVFSCSVMHEALHNHYTQKSLSLSPGK

SEQ ID NO: 417 - protein, 982 aa, Artificial Sequence
  Synthetic
QVQLVESGGGLVKPGGSLRLSCAASGFTFSDYYMTWIRQAPGKGLEWLSYISSSGSTIYYADSVKGRFTISRDNAKNSLFLQMNSLRAEDTAVYYCARDRNSHFDYWGQGTLVTVSSGGGGSGGGGSGGGGSDIQMTQSPSSVSASVGDRVTITCRASQGINTWLAWYQQKPGKAPKLLIYGASGLQSGVPSRFSGSGSGTDFTLTISSLQPEDFATYYCQQAKSFPRTFGQGTKVEIKSGGGGSEVQLVESGGGLVQPGGSLKLSCAASGFTFNKYAMNWVRQAPGKGLEWVARIRSKYNNYATYYADSVKDRFTISRDDSKNTAYLQMNNLKTEDTAVYYCVRHGNFGNSYISYWAYWGQGTLVTVSSGGGGSGGGGSGGGGSQTVVTQEPSLTVSPGGTVTLTCGSSTGAVTSGNYPNWVQQKPGQAPRGLIGGTKFLAPGTPARFSGSLLGGKAALTLSGVQPEDEAEYYCVLWYSNRWVFGGGTKLTVLGGGGDKTHTCPPCPAPELLGGPSVFLFPPKPKDTLMISRTPEVTCVVVDVSHEDPEVKFNWYVDGVEVHNAKTKPCEEQYGSTYRCVSVLTVLHQDWLNGKEYKCKVSNKALPAPIEKTISKAKGQPREPQVYTLPPSREEMTKNQVSLTCLVKGFYPSDIAVEWESNGQPENNYKTTPPVLDSDGSFFLYSKLTVDKSRWQQGNVFSCSVMHEALHNHYTQKSLSLSPGKGGGGSGGGGSGGGGSGGGGSGGGGSGGGGSDKTHTCPPCPAPELLGGPSVFLFPPKPKDTLMISRTPEVTCVVVDVSHEDPEVKFNWYVDGVEVHNAKTKPCEEQYGSTYRCVSVLTVLHQDWLNGKEYKCKVSNKALPAPIEKTISKAKGQPREPQVYTLPPSREEMTKNQVSLTCLVKGFYPSDIAVEWESNGQPENNYKTTPPVLDSDGSFFLYSKLTVDKSRWQQGNVFSCSVMHEALHNHYTQKSLSLSPGK

SEQ ID NO: 418 - protein, 997 aa, Artificial Sequence
  Synthetic
EVQLLESGGGVVQPGRSLRLSCAASGFTFSSYGMGWVRQAPGKGLEWVAVISYDGSNKYYADSVKGRFTISRDNSKNTLYLQMNSLRAEDTAVYYCAREGAHFGSGSYYPLYYYYAMDVWGQGTTVTVSSGGGGSGGGGSGGGGSELTLTQSPGTLSLSPGERATLSCRASQSVSSSYLAWYQQKPGQAPRLLIYGASIRATGIPDRFSGSGSGTDFTLTISRLEPEDFAVYYCQQYGSSPIFTFGPGTKVEIKSGGGGSEVQLVESGGGLVQPGGSLKLSCAASGFTFNKYAMNWVRQAPGKGLEWVARIRSKYNNYATYYADSVKDRFTISRDDSKNTAYLQMNNLKTEDTAVYYCVRHGNFGNSYISYWAYWGQGTLVTVSSGGGGSGGGGSGGGGSQTVVTQEPSLTVSPGGTVTLTCGSSTGAVTSGNYPNWVQQKPGQAPRGLIGGTKFLAPGTPARFSGSLLGGKAALTLSGVQPEDEAEYYCVLWYSNRWVFGGGTKLTVLGGGGDKTHTCPPCPAPELLGGPSVFLFPPKPKDTLMISRTPEVTCVVVDVSHEDPEVKFNWYVDGVEVHNAKTKPCEEQYGSTYRCVSVLTVLHQDWLNGKEYKCKVSNKALPAPIEKTISKAKGQPREPQVYTLPPSREEMTKNQVSLTCLVKGFYPSDIAVEWESNGQPENNYKTTPPVLDSDGSFFLYSKLTVDKSRWQQGNVFSCSVMHEALHNHYTQKSLSLSPGKGGGGSGGGGSGGGGSGGGGSGGGGSGGGGSDKTHTCPPCPAPELLGGPSVFLFPPKPKDTLMISRTPEVTCVVVDVSHEDPEVKFNWYVDGVEVHNAKTKPCEEQYGSTYRCVSVLTVLHQDWLNGKEYKCKVSNKALPAPIEKTISKAKGQPREPQVYTLPPSREEMTKNQVSLTCLVKGFYPSDIAVEWESNGQPENNYKTTPPVLDSDGSFFLYSKLTVDKSRWQQGNVFSCSVMHEALHNHYTQKSLSLSPGK

SEQ ID NO: 419 - protein, 1237 aa, Artificial Sequence
  Synthetic
QVQLVESGGGLVKPGESLRLSCAASGFTFSDYYMYWVRQAPGKGLEWVAIISDGGYYTYYSDIIKGRFTISRDNAKNSLYLQMNSLKAEDTAVYYCARGFPLLRHGAMDYWGQGTLVTVSSGGGGSGGGGSGGGGSDIQMTQSPSSLSASVGDRVTITCKASQNVDTNVAWYQQKPGQAPKSLIYSASYRYSDVPSRFSGSASGTDFTLTISSVQSEDFATYYCQQYDSYPYTFGGGTKLEIKSGGGGSQVTLKESGPTLVKPTETLTLTCTVSGFSFRNARMGVSWIRQPPGKCLEWLAHIFSNDEKSYSTSLKSRLTISKDTSKSQVVLTMTNMDPVDTATYFCARVPEYSSGWYRFDYWGQGTLVTVSSGGGGSGGGGSGGGGSDIQMTQSPSSLSASVGDRVTISCRASQSIRSYLNWYQQKPGKAPKLLIYATSSLQGGVPSRFSGSGSGTDFTLTISSLQPEDFATYYCQQSYSTPFTFGCGTKVEIKSGGGGSEVQLVESGGGLVQPGGSLKLSCAASGFTFNKYAMNWVRQAPGKGLEWVARIRSKYNNYATYYADSVKDRFTISRDDSKNTAYLQMNNLKTEDTAVYYCVRHGNFGNSYISYWAYWGQGTLVTVSSGGGGSGGGGSGGGGSQTVVTQEPSLTVSPGGTVTLTCGSSTGAVTSGNYPNWVQQKPGQAPRGLIGGTKFLAPGTPARFSGSLLGGKAALTLSGVQPEDEAEYYCVLWYSNRWVFGGGTKLTVLGGGGDKTHTCPPCPAPELLGGPSVFLFPPKPKDTLMISRTPEVTCVVVDVSHEDPEVKFNWYVDGVEVHNAKTKPCEEQYGSTYRCVSVLTVLHQDWLNGKEYKCKVSNKALPAPIEKTISKAKGQPREPQVYTLPPSREEMTKNQVSLTCLVKGFYPSDIAVEWESNGQPENNYKTTPPVLDSDGSFFLYSKLTVDKSRWQQGNVFSCSVMHEALHNHYTQKSLSLSPGKGGGGSGGGGSGGGGSGGGGSGGGGSGGGGSDKTHTCPPCPAPELLGGPSVFLFPPKPKDTLMISRTPEVTCVVVDVSHEDPEVKFNWYVDGVEVHNAKTKPCEEQYGSTYRCVSVLTVLHQDWLNGKEYKCKVSNKALPAPIEKTISKAKGQPREPQVYTLPPSREEMTKNQVSLTCLVKGFYPSDIAVEWESNGQPENNYKTTPPVLDSDGSFFLYSKLTVDKSRWQQGNVFSCSVMHEALHNHYTQKSLSLSPGK

SEQ ID NO: 420 - protein, 10 aa, Artificial Sequence
  Synthetic
GFTFNKYAIN

SEQ ID NO: 421 - protein, 18 aa, Artificial Sequence
  Synthetic
RIRSKYNNYATYYADQVK

SEQ ID NO: 422 - protein, 14 aa, Artificial Sequence
  Synthetic
HANFGNSYISYWAY

SEQ ID NO: 423 - protein, 14 aa, Artificial Sequence
  Synthetic
ASSTGAVTSGNYPN

SEQ ID NO: 424 - protein, 7 aa, Artificial Sequence
  Synthetic
GTKFLVP

SEQ ID NO: 425 - protein, 9 aa, Artificial Sequence
  Synthetic
TLWYSNRWV

SEQ ID NO: 426 - protein, 249 aa, Artificial Sequence
  Synthetic
EVQLVESGGGLVQPGGSLKLSCAASGFTFNKYAINWVRQAPGKGLEWVARIRSKYNNYATYYADQVKDRFTISRDDSKNTAYLQMNNLKTEDTAVYYCVRHANFGNSYISYWAYWGQGTLVTVSSGGGGSGGGGSGGGGSQTVVTQEPSLTVSPGGTVTLTCASSTGAVTSGNYPNWVQQKPGQAPRGLIGGTKFLVPGTPARFSGSLLGGKAALTLSGVQPEDEAEYYCTLWYSNRWVFGGGTKLTVL

SEQ ID NO: 427 - protein, 1613 aa, Artificial Sequence
  Synthetic
QVQLVQSGAEVKKPGASVKVSCKASGYTFTDYYMHWVRQAPGQCLEWMGWINPNSGGPNYAQKFQGRVTMTRDTSISTAHMELSRLRSDDTAVYYCAREKHAVAGIGFDYWGQGTLVTVSSGGGGSGGGGSGGGGSDIQMTQSPSSVSASVGDRVTITCQASQDISNYLNWYQQKPGKAPKLLIYAASSLESGVPSRFSGSGSGTDFTLTISSLQPEDFATYYCQQANSFPLTFGCGTKVDIKSGGGGSEVQLVESGGGLVQPGGSLKLSCAASGFTFNKYAMNWVRQAPGKCLEWVARIRSKYNNYATYYADSVKDRFTISRDDSKNTAYLQMNNLKTEDTAVYYCVRHGNFGNSYISYWAYWGQGTLVTVSSGGGGSGGGGSGGGGSQTVVTQEPSLTVSPGGTVTLTCGSSTGAVTSGNYPNWVQQKPGQAPRGLIGGTKFLAPGTPARFSGSLLGGKAALTLSGVQPEDEAEYYCVLWYSNRWVFGCGTKLTVLGGGGSGGGGSGGGGSDAHKSEVAHRFKDLGEENFKALVLIAFAQYLQQCPFEDHVKLVNEVTEFAKTCVADESAENCDKSLHTLFGDKLCTVATLRETYGEMADCCAKQEPERNECFLQHKDDNPNLPRLVRPEVDVMCTAFHDNEETFLKKYLYEIARRHPYFYAPELLFFAKRYKAAFTECCQAADKAACLLPKLDELRDEGKASSAKQRLKCASLQKFGERAFKAWAVARLSQRFPKAEFAEVSKLVTDLTKVHTECCHGDLLECADDRADLAKYICENQDSISSKLKECCEKPLLEKSHCIAEVENDEMPADLPSLAADFVESKDVCKNYAEAKDVFLGMFLYEYARRHPDYSVVLLLRLAKTYETTLEKCCAAADPHECYAKVFDEFKPLVEEPQNLIKQNCELFEQLGEYKFQNALLVRYTKKVPQVSTPTLVEVSRNLGKVGSKCCKHPEAKRMPCAEDYLSVVLNQLCVLHEKTPVSDRVTKCCTESLVNRRPCFSALEVDETYVPKEFNAETFTFHADICTLSEKERQIKKQTALVELVKHKPKATKEQLKAVMDDFAAFVEKCCKADDKETCFAEEGKKLVAASQAALGLGGGGSGGGGSGGGGSQVTLKESGPTLVKPTETLTLTCTVSGFSFRNARMGVSWIRQPPGKCLEWLAHIFSNDEKSYSTSLKSRLTISKDTSKSQVVLTMTNMDPVDTATYFCARVPEYSSGWYRFDYWGQGTLVTVSSGGGGSGGGGSGGGGSDIQMTQSPSSLSASVGDRVTISCRASQSIRSYLNWYQQKPGKAPKLLIYATSSLQGGVPSRFSGSGSGTDFTLTISSLQPEDFATYYCQQSYSTPFTFGCGTKVEIKSGGGGSEVQLVESGGGLVQPGGSLKLSCAASGFTFNKYAMNWVRQAPGKCLEWVARIRSKYNNYATYYADSVKDRFTISRDDSKNTAYLQMNNLKTEDTAVYYCVRHGNFGNSYISYWAYWGQGTLVTVSSGGGGSGGGGSGGGGSQTVVTQEPSLTVSPGGTVTLTCGSSTGAVTSGNYPNWVQQKPGQAPRGLIGGTKFLAPGTPARFSGSLLGGKAALTLSGVQPEDEAEYYCVLWYSNRWVFGCGTKLTVL

SEQ ID NO: 428 - protein, 1003 aa, Artificial Sequence
  Synthetic
QVQLVQSGAEVKKPGASVKVSCKASGYTFTDYYMHWVRQAPGQCLEWMGWINPNSGGPNYAQKFQGRVTMTRDTSISTAHMELSRLRSDDTAVYYCAREKHAVAGIGFDYWGQGTLVTVSSGGGGSGGGGSGGGGSDIQMTQSPSSVSASVGDRVTITCQASQDISNYLNWYQQKPGKAPKLLIYAASSLESGVPSRFSGSGSGTDFTLTISSLQPEDFATYYCQQANSFPLTFGCGTKVDIKSGGGGSEVQLVESGGGLVQPGGSLKLSCAASGFTFNKYAMNWVRQAPGKCLEWVARIRSKYNNYATYYADSVKDRFTISRDDSKNTAYLQMNNLKTEDTAVYYCVRHGNFGNSYISYWAYWGQGTLVTVSSGGGGSGGGGSGGGGSQTVVTQEPSLTVSPGGTVTLTCGSSTGAVTSGNYPNWVQQKPGQAPRGLIGGTKFLAPGTPARFSGSLLGGKAALTLSGVQPEDEAEYYCVLWYSNRWVFGCGTKLTVLGGGGSQVTLKESGPTLVKPTETLTLTCTVSGFSFRNARMGVSWIRQPPGKCLEWLAHIFSNDEKSYSTSLKSRLTISKDTSKSQVVLTMTNMDPVDTATYFCARVPEYSSGWYRFDYWGQGTLVTVSSGGGGSGGGGSGGGGSDIQMTQSPSSLSASVGDRVTISCRASQSIRSYLNWYQQKPGKAPKLLIYATSSLQGGVPSRFSGSGSGTDFTLTISSLQPEDFATYYCQQSYSTPFTFGCGTKVEIKSGGGGSEVQLVESGGGLVQPGGSLKLSCAASGFTFNKYAMNWVRQAPGKCLEWVARIRSKYNNYATYYADSVKDRFTISRDDSKNTAYLQMNNLKTEDTAVYYCVRHGNFGNSYISYWAYWGQGTLVTVSSGGGGSGGGGSGGGGSQTVVTQEPSLTVSPGGTVTLTCGSSTGAVTSGNYPNWVQQKPGQAPRGLIGGTKFLAPGTPARFSGSLLGGKAALTLSGVQPEDEAEYYCVLWYSNRWVFGCGTKLTVL

SEQ ID NO: 429 - protein, 1048 aa, Artificial Sequence
  Synthetic
QVQLVQSGAEVKKPGASVKVSCKASGYTFTDYYMHWVRQAPGQCLEWMGWINPNSGGPNYAQKFQGRVTMTRDTSISTAHMELSRLRSDDTAVYYCAREKHAVAGIGFDYWGQGTLVTVSSGGGGSGGGGSGGGGSDIQMTQSPSSVSASVGDRVTITCQASQDISNYLNWYQQKPGKAPKLLIYAASSLESGVPSRFSGSGSGTDFTLTISSLQPEDFATYYCQQANSFPLTFGCGTKVDIKSGGGGSEVQLVESGGGLVQPGGSLKLSCAASGFTFNKYAMNWVRQAPGKCLEWVARIRSKYNNYATYYADSVKDRFTISRDDSKNTAYLQMNNLKTEDTAVYYCVRHGNFGNSYISYWAYWGQGTLVTVSSGGGGSGGGGSGGGGSQTVVTQEPSLTVSPGGTVTLTCGSSTGAVTSGNYPNWVQQKPGQAPRGLIGGTKFLAPGTPARFSGSLLGGKAALTLSGVQPEDEAEYYCVLWYSNRWVFGCGTKLTVLEAAAKEAAAKEAAAKEAAAKEAAAKEAAAKEAAAKEAAAKEAAAKEAAAKQVTLKESGPTLVKPTETLTLTCTVSGFSFRNARMGVSWIRQPPGKCLEWLAHIFSNDEKSYSTSLKSRLTISKDTSKSQVVLTMTNMDPVDTATYFCARVPEYSSGWYRFDYWGQGTLVTVSSGGGGSGGGGSGGGGSDIQMTQSPSSLSASVGDRVTISCRASQSIRSYLNWYQQKPGKAPKLLIYATSSLQGGVPSRFSGSGSGTDFTLTISSLQPEDFATYYCQQSYSTPFTFGCGTKVEIKSGGGGSEVQLVESGGGLVQPGGSLKLSCAASGFTFNKYAMNWVRQAPGKCLEWVARIRSKYNNYATYYADSVKDRFTISRDDSKNTAYLQMNNLKTEDTAVYYCVRHGNFGNSYISYWAYWGQGTLVTVSSGGGGSGGGGSGGGGSQTVVTQEPSLTVSPGGTVTLTCGSSTGAVTSGNYPNWVQQKPGQAPRGLIGGTKFLAPGTPARFSGSLLGGKAALTLSGVQPEDEAEYYCVLWYSNRWVFGCGTKLTVL

SEQ ID NO: 430 - protein, 1996 aa, Artificial Sequence
  Synthetic
QVQLVQSGAEVKKPGASVKVSCKASGYTFTDYYMHWVRQAPGQCLEWMGWINPNSGGPNYAQKFQGRVTMTRDTSISTAHMELSRLRSDDTAVYYCAREKHAVAGIGFDYWGQGTLVTVSSGGGGSGGGGSGGGGSDIQMTQSPSSVSASVGDRVTITCQASQDISNYLNWYQQKPGKAPKLLIYAASSLESGVPSRFSGSGSGTDFTLTISSLQPEDFATYYCQQANSFPLTFGCGTKVDIKSGGGGSEVQLVESGGGLVQPGGSLKLSCAASGFTFNKYAMNWVRQAPGKCLEWVARIRSKYNNYATYYADSVKDRFTISRDDSKNTAYLQMNNLKTEDTAVYYCVRHGNFGNSYISYWAYWGQGTLVTVSSGGGGSGGGGSGGGGSQTVVTQEPSLTVSPGGTVTLTCGSSTGAVTSGNYPNWVQQKPGQAPRGLIGGTKFLAPGTPARFSGSLLGGKAALTLSGVQPEDEAEYYCVLWYSNRWVFGCGTKLTVLGGGGSGGGGSGGGGSDKTHTCPPCPAPELLGGPSVFLFPPKPKDTLMISRTPEVTCVVVDVSHEDPEVKFNWYVDGVEVHNAKTKPCEEQYGSTYRCVSVLTVLHQDWLNGKEYKCKVSNKALPAPIEKTISKAKGQPREPQVYTLPPSREEMTKNQVSLTCLVKGFYPSDIAVEWESNGQPENNYKTTPPVLDSDGSFFLYSKLTVDKSRWQQGNVFSCSVMHEALHNHYTQKSLSLSPGKGGGGSGGGGSGGGGSGGGGSGGGGSGGGGSDKTHTCPPCPAPELLGGPSVFLFPPKPKDTLMISRTPEVTCVVVDVSHEDPEVKFNWYVDGVEVHNAKTKPCEEQYGSTYRCVSVLTVLHQDWLNGKEYKCKVSNKALPAPIEKTISKAKGQPREPQVYTLPPSREEMTKNQVSLTCLVKGFYPSDIAVEWESNGQPENNYKTTPPVLDSDGSFFLYSKLTVDKSRWQQGNVFSCSVMHEALHNHYTQKSLSLSPGKDKTHTCPPCPAPELLGGPSVFLFPPKPKDTLMISRTPEVTCVVVDVSHEDPEVKFNWYVDGVEVHNAKTKPCEEQYGSTYRCVSVLTVLHQDWLNGKEYKCKVSNKALPAPIEKTISKAKGQPREPQVYTLPPSREEMTKNQVSLTCLVKGFYPSDIAVEWESNGQPENNYKTTPPVLDSDGSFFLYSKLTVDKSRWQQGNVFSCSVMHEALHNHYTQKSLSLSPGKGGGGSGGGGSGGGGSGGGGSGGGGSGGGGSDKTHTCPPCPAPELLGGPSVFLFPPKPKDTLMISRTPEVTCVVVDVSHEDPEVKFNWYVDGVEVHNAKTKPCEEQYGSTYRCVSVLTVLHQDWLNGKEYKCKVSNKALPAPIEKTISKAKGQPREPQVYTLPPSREEMTKNQVSLTCLVKGFYPSDIAVEWESNGQPENNYKTTPPVLDSDGSFFLYSKLTVDKSRWQQGNVFSCSVMHEALHNHYTQKSLSLSPGKGGGGSGGGGSGGGGSQVTLKESGPTLVKPTETLTLTCTVSGFSFRNARMGVSWIRQPPGKCLEWLAHIFSNDEKSYSTSLKSRLTISKDTSKSQVVLTMTNMDPVDTATYFCARVPEYSSGWYRFDYWGQGTLVTVSSGGGGSGGGGSGGGGSDIQMTQSPSSLSASVGDRVTISCRASQSIRSYLNWYQQKPGKAPKLLIYATSSLQGGVPSRFSGSGSGTDFTLTISSLQPEDFATYYCQQSYSTPFTFGCGTKVEIKSGGGGSEVQLVESGGGLVQPGGSLKLSCAASGFTFNKYAMNWVRQAPGKCLEWVARIRSKYNNYATYYADSVKDRFTISRDDSKNTAYLQMNNLKTEDTAVYYCVRHGNFGNSYISYWAYWGQGTLVTVSSGGGGSGGGGSGGGGSQTVVTQEPSLTVSPGGTVTLTCGSSTGAVTSGNYPNWVQQKPGQAPRGLIGGTKFLAPGTPARFSGSLLGGKAALTLSGVQPEDEAEYYCVLWYSNRWVFGCGTKLTVL

SEQ ID NO: 431 - protein, 1626 aa, Artificial Sequence
  Synthetic
ELVMTQSPSSLTVTAGEKVTMSCKSSQSLLNSGNQKNYLTWYQQKPGQPPKLLIYWASTRESGVPDRFTGSGSGTDFTLTISSVQAEDLAVYYCQNDYSYPLTFGAGTKLEIKGGGGSGGGGSGGGGSEVQLLEQSGAELVRPGTSVKISCKASGYAFTNYWLGWVKQRPGHGLEWIGDIFPGSGNIHYNEKFKGKATLTADKSSSTAYMQLSSLTFEDSAVYFCARLRNWDEPMDYWGQGTTVTVSSGGGGSEVQLVESGGGLVQPGGSLKLSCAASGFTFNKYAMNWVRQAPGKCLEWVARIRSKYNNYATYYADSVKDRFTISRDDSKNTAYLQMNNLKTEDTAVYYCVRHGNFGNSYISYWAYWGQGTLVTVSSGGGGSGGGGSGGGGSQTVVTQEPSLTVSPGGTVTLTCGSSTGAVTSGNYPNWVQQKPGQAPRGLIGGTKFLAPGTPARFSGSLLGGKAALTLSGVQPEDEAEYYCVLWYSNRWVFGCGTKLTVLGGGGSGGGGSGGGGSDAHKSEVAHRFKDLGEENFKALVLIAFAQYLQQCPFEDHVKLVNEVTEFAKTCVADESAENCDKSLHTLFGDKLCTVATLRETYGEMADCCAKQEPERNECFLQHKDDNPNLPRLVRPEVDVMCTAFHDNEETFLKKYLYEIARRHPYFYAPELLFFAKRYKAAFTECCQAADKAACLLPKLDELRDEGKASSAKQRLKCASLQKFGERAFKAWAVARLSQRFPKAEFAEVSKLVTDLTKVHTECCHGDLLECADDRADLAKYICENQDSISSKLKECCEKPLLEKSHCIAEVENDEMPADLPSLAADFVESKDVCKNYAEAKDVFLGMFLYEYARRHPDYSVVLLLRLAKTYETTLEKCCAAADPHECYAKVFDEFKPLVEEPQNLIKQNCELFEQLGEYKFQNALLVRYTKKVPQVSTPTLVEVSRNLGKVGSKCCKHPEAKRMPCAEDYLSVVLNQLCVLHEKTPVSDRVTKCCTESLVNRRPCFSALEVDETYVPKEFNAETFTFHADICTLSEKERQIKKQTALVELVKHKPKATKEQLKAVMDDFAAFVEKCCKADDKETCFAEEGKKLVAASQAALGLGGGGSGGGGSGGGGSEVQLLESGGGVVQPGRSLRLSCAASGFTFSSYGMGWVRQAPGKGLEWVAVISYDGSNKYYADSVKGRFTISRDNSKNTLYLQMNSLRAEDTAVYYCAREGAHFGSGSYYPLYYYYAMDVWGQGTTVTVSSGGGGSGGGGSGGGGSELTLTQSPGTLSLSPGERATLSCRASQSVSSSYLAWYQQKPGQAPRLLIYGASIRATGIPDRFSGSGSGTDFTLTISRLEPEDFAVYYCQQYGSSPIFTFGPGTKVEIKSGGGGSEVQLVESGGGLVQPGGSLKLSCAASGFTFNKYAMNWVRQAPGKCLEWVARIRSKYNNYATYYADSVKDRFTISRDDSKNTAYLQMNNLKTEDTAVYYCVRHGNFGNSYISYWAYWGQGTLVTVSSGGGGSGGGGSGGGGSQTVVTQEPSLTVSPGGTVTLTCGSSTGAVTSGNYPNWVQQKPGQAPRGLIGGTKFLAPGTPARFSGSLLGGKAALTLSGVQPEDEAEYYCVLWYSNRWVFGCGTKLTVL

SEQ ID NO: 432 - protein, 17 aa, Artificial Sequence
  Synthetic
NIAYGVAGTNYNQKFQG

SEQ ID NO: 433 - protein, 117 aa, Artificial Sequence
  Synthetic
QVQLVQSGAEVKKPGASVKVSCKASGYTFTNYWMNWVRQAPGQCLEWMGNIAYGVAGTNYNQKFQGRVTMTVDTSSSTAYMELSRLRSDDTAVYYCATRYFYVMDYWGQGTLVTVSS

SEQ ID NO: 434 - protein, 1474 aa, Artificial Sequence
  Synthetic
QVQLVQSGAEVKKPGASVKVSCKASGYTFTNYWMNWVRQAPGQCLEWMGNIAYGVAGTNYNQKFQGRVTMTVDTSSSTAYMELSRLRSDDTAVYYCATRYFYVMDYWGQGTLVTVSSGGGGQGGGGQGGGGQDIQMTQSPSSLSASVGDRVTITCRASQDISNYLNWYQQKPGKVPKLLIYYTSRLHSGVPSRFSGSGSGTDFTLTISSLQPEDVATYYCVQYAQFPLTFGCGTKVEIKSGGGGQEVQLVESGGGLVQPGGSLKLSCAASGFTFNKYAMNWVRQAPGKGMEWVARIRSKYNNYATYYADAVKDRFTISRDDSKNTLYLQMNNLKTEDTAVYYCVRAGNFGSSYISYFAYWGQGTLVTVSSGGGGQGGGGQGGGGQQTVVTQEPSLTVSPGGTVTITCGSSTGAVTSGNYPNWIQKKPGQAPRGLIGGTKFLAPGTPARFSGSLEGGKAALTLSGVQPEDEAEYYCVLYYSNRWVFGSGTKLTVLGGGGCPPCPAPELLGGPSVFLFPPKPKDTLMISRTPEVTCVVVDVSHEEPEVKFNWYVDGVEVHNAKTKPCEEQYGSTYRCVSVLTVLHQDWLNGKEYKCKVSNKALPAPIEKTISKAKGQPREPQVYTLPPSREEMTKNQVSLTCLVKGFYPSDIAVEWESNGQPENNYKTTPPVLDSDGSFFLYSKLTVDKSRWQQGNVFSCSVMHEALHNHYTQKSLSLSPGKGGGGQGGGGQGGGGQGGGGQGGGGQGGGGQCPPCPAPELLGGPSVFLFPPKPKDTLMISRTPEVTCVVVDVSHEEPEVKFNWYVDGVEVHNAKTKPCEEQYGSTYRCVSVLTVLHQDWLNGKEYKCKVSNKALPAPIEKTISKAKGQPREPQVYTLPPSREEMTKNQVSLTCLVKGFYPSDIAVEWESNGQPENNYKTTPPVLDSDGSFFLYSKLTVDKSRWQQGNVFSCSVMHEALHNHYTQKSLSLSPGKGGGGQVQLQESGPGLVKPSETLSLTCTVSGGSISSSSYFWGWIRQPPGKCLEWIGNIYYSGSSNYNPSLKSRVTISVDTSKNQFSLKLSSVTAADTAVYYCARLPRGDRDAFDIWGQGTMVTVSSGGGGQGGGGQGGGGQDIVMTQSPSSLSASVGDRVTITCRASQGISNYLAWYQQKPGKVPKLLIYAASTLQSGVPSRFSGSGSGTDFTLTISSLQPEDFATYYCQQSYSTPFTFGCGTKVEIKSGGGGQEVQLVESGGGLVQPGGSLKLSCAASGFTFNKYAMNWVRQAPGKGMEWVARIRSKYNNYATYYADAVKDRFTISRDDSKNTLYLQMNNLKTEDTAVYYCVRAGNFGSSYISYFAYWGQGTLVTVSSGGGGQGGGGQGGGGQQTVVTQEPSLTVSPGGTVTITCGSSTGAVTSGNYPNWIQKKPGQAPRGLIGGTKFLAPGTPARFSGSLEGGKAALTLSGVQPEDEAEYYCVLYYSNRWVFGSGTKLTVL

SEQ ID NO: 435 - protein, 1474 aa, Artificial Sequence
  Synthetic
QVQLVQSGAEVKKPGASVKVSCKASGYTFTNYWMNWVRQAPGQCLEWMGNIAYGVAGTNYNQKFQGRVTMTVDTSSSTAYMELSRLRSDDTAVYYCATRYFYVMDYWGQGTLVTVSSGGGGQGGGGQGGGGQEIQMTQSPSSLSASVGDRVTITCRASQDISNYLNWYQQKPGKVPKLLIYYTSRLHSGVPSRFSGSGSGTDFTLTISSLQPEDVATYYCVQYAQFPLTFGCGTKVEIKSGGGGQEVQLVESGGGLVQPGGSLKLSCAASGFTFNKYAMNWVRQAPGKGMEWVARIRSKYNNYATYYADAVKDRFTISRDDSKNTLYLQMNNLKTEDTAVYYCVRAGNFGSSYISYFAYWGQGTLVTVSSGGGGQGGGGQGGGGQQTVVTQEPSLTVSPGGTVTITCGSSTGAVTSGNYPNWIQKKPGQAPRGLIGGTKFLAPGTPARFSGSLEGGKAALTLSGVQPEDEAEYYCVLYYSNRWVFGSGTKLTVLGGGGCPPCPAPELLGGPSVFLFPPKPKDTLMISRTPEVTCVVVDVSHEEPEVKFNWYVDGVEVHNAKTKPCEEQYGSTYRCVSVLTVLHQDWLNGKEYKCKVSNKALPAPIEKTISKAKGQPREPQVYTLPPSREEMTKNQVSLTCLVKGFYPSDIAVEWESNGQPENNYKTTPPVLDSDGSFFLYSKLTVDKSRWQQGNVFSCSVMHEALHNHYTQKSLSLSPGKGGGGQGGGGQGGGGQGGGGQGGGGQGGGGQCPPCPAPELLGGPSVFLFPPKPKDTLMISRTPEVTCVVVDVSHEEPEVKFNWYVDGVEVHNAKTKPCEEQYGSTYRCVSVLTVLHQDWLNGKEYKCKVSNKALPAPIEKTISKAKGQPREPQVYTLPPSREEMTKNQVSLTCLVKGFYPSDIAVEWESNGQPENNYKTTPPVLDSDGSFFLYSKLTVDKSRWQQGNVFSCSVMHEALHNHYTQKSLSLSPGKGGGGQVQLQESGPGLVKPSETLSLTCTVSGGSISSSSYFWGWIRQPPGKCLEWIGNIYYSGSSNYNPSLKSRVTISVDTSKNQFSLKLSSVTAADTAVYYCARLPRGDRDAFDIWGQGTMVTVSSGGGGQGGGGQGGGGQEIVMTQSPSSLSASVGDRVTITCRASQGISNYLAWYQQKPGKVPKLLIYAASTLQSGVPSRFSGSGSGTDFTLTISSLQPEDFATYYCQQSYSTPFTFGCGTKVEIKSGGGGQEVQLVESGGGLVQPGGSLKLSCAASGFTFNKYAMNWVRQAPGKGMEWVARIRSKYNNYATYYADAVKDRFTISRDDSKNTLYLQMNNLKTEDTAVYYCVRAGNFGSSYISYFAYWGQGTLVTVSSGGGGQGGGGQGGGGQQTVVTQEPSLTVSPGGTVTITCGSSTGAVTSGNYPNWIQKKPGQAPRGLIGGTKFLAPGTPARFSGSLEGGKAALTLSGVQPEDEAEYYCVLYYSNRWVFGSGTKLTVL

SEQ ID NO: 436 - protein, 5 aa, Artificial Sequence
  Synthetic
KYAMN

SEQ ID NO: 437 - protein, 19 aa, Artificial Sequence
  Synthetic
RIRSKYNNYATYYADAVKD

SEQ ID NO: 438 - protein, 14 aa, Artificial Sequence
  Synthetic
AGNFGTSYISYWAY

SEQ ID NO: 439 - protein, 14 aa, Artificial Sequence
  Synthetic
GSSTGAVTSGNYPN

SEQ ID NO: 440 - protein, 7 aa, Artificial Sequence
  Synthetic
GTKFLAP

SEQ ID NO: 441 - protein, 9 aa, Artificial Sequence
  Synthetic
VLWYSNRWV

SEQ ID NO: 442 - protein, 125 aa, Artificial Sequence
  Synthetic
EVQLVESGGGLVQPGGSLKLSCAASGFTFNKYAMNWVRQAPGKGMEWVARIRSKYNNYATYYADAVKDRFTISRDDSKNTLYLQMNNLKTEDTAVYYCVRAGNFGTSYISYWAYWGQGTLVTVSS

SEQ ID NO: 443 - protein, 109 aa, Artificial Sequence; identical to SEQ ID NO: 60
  Synthetic

SEQ ID NO: 444 - protein, 12 aa, Artificial Sequence
  Synthetic
ESKYGPPCPSCP

SEQ ID NO: 445 - protein, 15 aa, Artificial Sequence
  Synthetic
EPKSCDKTHTCPPCP

SEQ ID NO: 446 - protein, 5 aa, Artificial Sequence
  Synthetic
RYDMH

SEQ ID NO: 447 - protein, 17 aa, Artificial Sequence
  Synthetic
IISYDGSNKYYGDAVKG

SEQ ID NO: 448 - protein, 8 aa, Artificial Sequence
  Synthetic
RAGFQFDF

SEQ ID NO: 449 - protein, 14 aa, Artificial Sequence
  Synthetic
TGTSSDVGGYNYVS

SEQ ID NO: 450 - protein, 7 aa, Artificial Sequence
  Synthetic
DVSSRPS

SEQ ID NO: 451 - protein, 10 aa, Artificial Sequence
  Synthetic
SSYTSSSTWV

SEQ ID NO: 452 - protein, 117 aa, Artificial Sequence
  Synthetic
QVQLVESGGGVVQPGRSLRLSCAASGFTFSRYDMHWVRQAPGQCLEWMAIISYDGSNKYYGDAVKGRFTISRDNSRNTLYLQMNSLRAEDTAVYHCVKRAGFQFDFWGQGTLVTVSS

SEQ ID NO: 453 - protein, 110 aa, Artificial Sequence
  Synthetic
QSALTQPPSVSGSPGQSITISCTGTSSDVGGYNYVSWYQQHPGKAPKLMIYDVSSRPSGVSNRFSGSKSGNTASLTISGLQAEDEADYYCSSYTSSSTWVFGCGTKLTVL

SEQ ID NO: 454 - protein, 5 aa, Artificial Sequence
  Synthetic
DYGMH

SEQ ID NO: 455 - protein, 17 aa, Artificial Sequence
  Synthetic
GISWNSGNIGYADSVKG

SEQ ID NO: 456 - protein, 16 aa, Artificial Sequence
  Synthetic
PDCSSTSCYRGYYFDY

SEQ ID NO: 457 - protein, 11 aa, Artificial Sequence
  Synthetic
GGNNIGSKSVH

SEQ ID NO: 458 - protein, 7 aa, Artificial Sequence
  Synthetic
DVSDRPS

SEQ ID NO: 459 - protein, 11 aa, Artificial Sequence
  Synthetic
QVWDSNTDHVV

SEQ ID NO: 460 - protein, 125 aa, Artificial Sequence
  Synthetic
EVQLVESGGGLVQPGRSLRLSCAASGFTFDDYGMHWVRQAPGKCLEWVSGISWNSGNIGYADSVKGRFTISRDNAKNSLYLQMNSLRAEDTALYYCAKPDCSSTSCYRGYYFDYWGQGTLVTVSS

SEQ ID NO: 461 - protein, 108 aa, Artificial Sequence
  Synthetic
SYVLTQPASVSVAPGQTARITCGGNNIGSKSVHWYQQKPGQAPILVVYDVSDRPSGIPERFSGSNSGNTATLTISRVEAGDEADYYCQVWDSNTDHVVFGCGTKLTVL

SEQ ID NO: 462 - protein, 5 aa, Artificial Sequence
  Synthetic
SYAII

SEQ ID NO: 463 - protein, 17 aa, Artificial Sequence
  Synthetic
GIIPMFGTANYAQKFQG

SEQ ID NO: 464 - protein, 9 aa, Artificial Sequence
  Synthetic
VSGTYHWGY

SEQ ID NO: 465 - protein, 14 aa, Artificial Sequence
  Synthetic
TGTSSDVGGYNYVS

SEQ ID NO: 466 - protein, 7 aa, Artificial Sequence
  Synthetic
DVSARPS

SEQ ID NO: 467 - protein, 10 aa, Artificial Sequence
  Synthetic
SSYISSTSLV

SEQ ID NO: 468 - protein, 118 aa, Artificial Sequence
  Synthetic
QVQLVQSGAEVKKPGSSVKVSCKASGGTFSSYAIIWVRQAPGQCLEWMGGIIPMFGTANYAQKFQGRVTITADESTSTAYMELSSLRSEDTAVYYCARVSGTYHWGYWGQGTLVTVSS

SEQ ID NO: 469 - protein, 110 aa, Artificial Sequence
  Synthetic
QSALTQPASVSGSPGQSITISCTGTSSDVGGYNYVSWYQQHPGKAPKLMIYDVSARPSGVSNRFSGSKSGNTASLTISGLQAEDEADYYCSSYISSTSLVFGCGTKLTVL

SEQ ID NO: 470 - protein, 5 aa, Artificial Sequence
  Synthetic
NYDMN

SEQ ID NO: 471 - protein, 17 aa, Artificial Sequence
  Synthetic
VISYDGSQKSYSDSVKG

SEQ ID NO: 472 - protein, 8 aa, Artificial Sequence
  Synthetic
RGATPFDY

SEQ ID NO: 473 - protein, 14 aa, Artificial Sequence
  Synthetic
TGTSNDVGGYNYVS

SEQ ID NO: 474 - protein, 7 aa, Artificial Sequence
  Synthetic
DVSSRPS

SEQ ID NO: 475 - protein, 11 aa, Artificial Sequence
  Synthetic
SSYARSRTFVA

SEQ ID NO: 476 - protein, 117 aa, Artificial Sequence
  Synthetic
QVQLVESGGGVLQPGRSLRLSCAASGFTFRNYDMNWVRQVPGKCLEWVAVISYDGSQKSYSDSVKGRFTISRDNSKNTLSLQMNSLRNEDTAVYYCAKRGATPFDYWGQGTLVTVSS

SEQ ID NO: 477 - protein, 111 aa, Artificial Sequence
  Synthetic
QSALTQPASVSGSPGQSITISCTGTSNDVGGYNYVSWYQQHPGKAPKLMIYDVSSRPSGISNRFSGSKSGNTASLTISGLQAEDEADYYCSSYARSRTFVAFGCGTKLTVL

SEQ ID NO: 478 - protein, 5 aa, Artificial Sequence
  Synthetic
NYDMN

SEQ ID NO: 479 - protein, 17 aa, Artificial Sequence
  Synthetic
VISYDGSNKYYSDSVKG

SEQ ID NO: 480 - protein, 8 aa, Artificial Sequence
  Synthetic
RGATPFDY

SEQ ID NO: 481 - protein, 14 aa, Artificial Sequence
  Synthetic
TGTSNDVGGYNYVS

SEQ ID NO: 482 - protein, 7 aa, Artificial Sequence
  Synthetic
DVSSRPS

SEQ ID NO: 483 - protein, 11 aa, Artificial Sequence
  Synthetic
SSYARSRTFVA

SEQ ID NO: 484 - protein, 117 aa, Artificial Sequence
  Synthetic
QVQLVESGGGVLQPGRSLRLSCAASGFTFRNYDMNWVRQVPGKCLEWVAVISYDGSNKYYSDSVKGRFTISRDNSKNTLSLQMNSLRNEDTAVYYCAKRGATPFDYWGQGTLVTVSS

SEQ ID NO: 485 - protein, 111 aa, Artificial Sequence; identical to SEQ ID NO: 477
  Synthetic

SEQ ID NO: 486 - protein, 5 aa, Artificial Sequence
  Synthetic
NYDMN

SEQ ID NO: 487 - protein, 17 aa, Artificial Sequence
  Synthetic
VISYDGSDKHYTDSVKG

SEQ ID NO: 488 - protein, 8 aa, Artificial Sequence
  Synthetic
RGATPVDY

SEQ ID NO: 489 - protein, 16 aa, Artificial Sequence
  Synthetic
KSSQSLLHSNGYNYLG

SEQ ID NO: 490 - protein, 7 aa, Artificial Sequence
  Synthetic
FGSSRAS

SEQ ID NO: 491 - protein, 9 aa, Artificial Sequence
  Synthetic
MQALQTPFT

SEQ ID NO: 492 - protein, 117 aa, Artificial Sequence
  Synthetic
QVQLVESGGGVVQPGRSLRLSCAASGFTFRNYDMNWVRQAPGKCLEWVAVISYDGSDKHYTDSVKGRFTISRDNSKNTLYLQMNSLRTEDTAVYYCAKRGATPVDYWGQGTLVTVSS

SEQ ID NO: 493 - protein, 112 aa, Artificial Sequence
  Synthetic
EIVMTQSPLSLPVTPGEPASISCKSSQSLLHSNGYNYLGWYLQKPGQSPQLLIYFGSSRASGVPDRFSGSGSGTDFTLKISGVEAEDVGVYYCMQALQTPFTFGCGTKVDIK

SEQ ID NO: 494 - protein, 5 aa, Artificial Sequence
  Synthetic
SYAII

SEQ ID NO: 495 - protein, 17 aa, Artificial Sequence
  Synthetic
GIIPIFGTANYAQKFQG

SEQ ID NO: 496 - protein, 9 aa, Artificial Sequence
  Synthetic
VSGTYHWGY

SEQ ID NO: 497 - protein, 14 aa, Artificial Sequence
  Synthetic
TGTSSDIGSFNLVS

SEQ ID NO: 498 - protein, 7 aa, Artificial Sequence
  Synthetic
EGYKRPS

SEQ ID NO: 499 - protein, 10 aa, Artificial Sequence
  Synthetic
SSYISSSTLV

SEQ ID NO: 500 - protein, 118 aa, Artificial Sequence
  Synthetic
QVQLVQSGAEVKKPGSSVKVSCKVSGGTFSSYAIIWVRQAPGQCLEWMGGIIPIFGTANYAQKFQGRVTITADESTSTAYMELSSLRSDDTAVYYCARVSGTYHWGYWGQGTLVTVSS

SEQ ID NO: 501 - protein, 110 aa, Artificial Sequence
  Synthetic
QSALTQPPSASGSPGQSITISCTGTSSDIGSFNLVSWYQQHPGKAPKLMIYEGYKRPSGVSDRFSGSKSGNTASLTISGLQAEDEADYYCSSYISSSTLVFGCGTKLTVL

SEQ ID NO: 502 - protein, 5 aa, Artificial Sequence
  Synthetic
RYWMS

SEQ ID NO: 503 - protein, 17 aa, Artificial Sequence
  Synthetic
EINPDSSTINYTPSLKD

SEQ ID NO: 504 - protein, 6 aa, Artificial Sequence
  Synthetic
YPWFTY

SEQ ID NO: 505 - protein, 16 aa, Artificial Sequence
  Synthetic
RSSQSLVHSNGNTYLH

SEQ ID NO: 506 - protein, 7 aa, Artificial Sequence
  Synthetic
KVSNRFS

SEQ ID NO: 507 - protein, 9 aa, Artificial Sequence
  Synthetic
SQSTHVPFT

SEQ ID NO: 508 - protein, 115 aa, Artificial Sequence
  Synthetic
EVQLVESGGGLVQPGGSLKLSCAASGFDFSRYWMSWVRQAPGKCLEWIGEINPDSSTINYTPSLKDKFIVSRDNAKNTLYLQMSKVRSEDTALYYCARYPWFTYWGQGTLVTVSS

SEQ ID NO: 509 - protein, 112 aa, Artificial Sequence
  Synthetic
EIVMTQTPLSLPVSLGDQASISCRSSQSLVHSNGNTYLHWYLQKPGQSPKLLIYKVSNRFSGVPDRFSGSGSGTDFTLKISRVEAEDLGVYFCSQSTHVPFTFGCGTKLEIK

SEQ ID NO: 510 - protein, 5 aa, Artificial Sequence
  Synthetic
NYDMN

SEQ ID NO: 511 - protein, 17 aa, Artificial Sequence
  Synthetic
VISYDGSNKYYTDSVKG

SEQ ID NO: 512 - protein, 8 aa, Artificial Sequence
  Synthetic
RGATPVDY

SEQ ID NO: 513 - protein, 16 aa, Artificial Sequence
  Synthetic
RSSQSLLHSNGYNYLG

SEQ ID NO: 514 - protein, 7 aa, Artificial Sequence
  Synthetic
LGSSRAS

SEQ ID NO: 515 - protein, 9 aa, Artificial Sequence
  Synthetic
MQALQTPFT

SEQ ID NO: 516 - protein, 117 aa, Artificial Sequence
  Synthetic
EVQLLESGGGLVQPGRSLRLSCAASGFTFRNYDMNWVRQVPGKCLEWVAVISYDGSNKYYTDSVKGRFTISRDNSKNTLYLQMNSLRTEDTAVYYCAKRGATPVDYWGQGTLVTVSS

SEQ ID NO: 517 - protein, 112 aa, Artificial Sequence
  Synthetic
EIVMTQSPLSLPVTPGEPASISCRSSQSLLHSNGYNYLGWYLQKPGQSPQLLIYLGSSRASGVPDRFSGSGSGTDFTLKISRVEAEDVGVYYCMQALQTPFTFGCGTKLEIK

SEQ ID NO: 518 - protein, 5 aa, Artificial Sequence
  Synthetic
NYDMN

SEQ ID NO: 519 - protein, 17 aa, Artificial Sequence
  Synthetic
VISYDGSQKTYTDSVKG

SEQ ID NO: 520 - protein, 8 aa, Artificial Sequence
  Synthetic
RGATPVDY

SEQ ID NO: 521 - protein, 16 aa, Artificial Sequence
  Synthetic
RSSQSLLHSNGYNYLG

SEQ ID NO: 522 - protein, 7 aa, Artificial Sequence
  Synthetic
LGSSRAS

SEQ ID NO: 523 - protein, 9 aa, Artificial Sequence
  Synthetic
MQALQTPFT

SEQ ID NO: 524 - protein, 117 aa, Artificial Sequence
  Synthetic
EVQLLESGGGLVQPGRSLRLSCAASGFTFRNYDMNWVRQVPGKCLEWVAVISYDGSQKTYTDSVKGRFTISRDNSKNTLYLQMNSLRTEDTAVYYCAKRGATPVDYWGQGTLVTVSS

SEQ ID NO: 525 - protein, 112 aa, Artificial Sequence; identical to SEQ ID NO: 517
  Synthetic

SEQ ID NO: 526 - protein, 5 aa, Artificial Sequence
  Synthetic
RYDMH

SEQ ID NO: 527 - protein, 17 aa, Artificial Sequence
  Synthetic
IISYDGSNKYYGDAVKG

SEQ ID NO: 528 - protein, 8 aa, Artificial Sequence
  Synthetic
RAGFQFDF

SEQ ID NO: 529 - protein, 14 aa, Artificial Sequence
  Synthetic
TGTSSDVGGYNYVS

SEQ ID NO: 530 - protein, 7 aa, Artificial Sequence
  Synthetic
EVSKRPA

SEQ ID NO: 531 - protein, 10 aa, Artificial Sequence
  Synthetic
SSYAGSNNWV

SEQ ID NO: 532 - protein, 117 aa, Artificial Sequence; identical to SEQ ID NO: 452
  Synthetic

SEQ ID NO: 533 - protein, 110 aa, Artificial Sequence
  Synthetic
QSALTQPPSASGSPGQSVTISCTGTSSDVGGYNYVSWYRQHPGKAPKLMIYEVSKRPAGVPDRFSGSKSGNTASLTVSGLQAEDEADYYCSSYAGSNNWVFGCGTKLTVL

SEQ ID NO: 534 - protein, 5 aa, Artificial Sequence
  Synthetic
RYDMN

SEQ ID NO: 535 - protein, 17 aa, Artificial Sequence
  Synthetic
FISYDGSNEDYPDAVKG

SEQ ID NO: 536 - protein, 8 aa, Artificial Sequence
  Synthetic
VGASPFDY

SEQ ID NO: 537 - protein, 14 aa, Artificial Sequence
  Synthetic
TGTSNDVGGYNYVS

SEQ ID NO: 538 - protein, 7 aa, Artificial Sequence
  Synthetic
EVSKRPS

SEQ ID NO: 539 - protein, 11 aa, Artificial Sequence
  Synthetic
ASYTGGRTYVG

SEQ ID NO: 540 - protein, 117 aa, Artificial Sequence
  Synthetic
QVQLVESGGGVVQPGRSLRLSCAASGFTFSRYDMNWVRQAPGKCLEWVAFISYDGSNEDYPDAVKGRFTISRDNSKNTLYLQMNSLRAEDTAVYYCAKVGASPFDYWGQGTLVTVSS

SEQ ID NO: 541 - protein, 111 aa, Artificial Sequence
  Synthetic
QSALTQPPSVSGSPGQSITISCTGTSNDVGGYNYVSWYQQHPGKAPKLMIYEVSKRPSGVPDRFSGSKSGNTASLTISGLQAEDEADYYCASYTGGRTYVGFGCGTKLTVL

SEQ ID NO: 542 - protein, 5 aa, Artificial Sequence
  Synthetic
RYDMN

SEQ ID NO: 543 - protein, 17 aa, Artificial Sequence
  Synthetic
FISYDGSNEDYPDAVKG

SEQ ID NO: 544 - protein, 8 aa, Artificial Sequence
  Synthetic
VGASPFDY

SEQ ID NO: 545 - protein, 14 aa, Artificial Sequence
  Synthetic
TGTSNDVGGYNYVS

SEQ ID NO: 546 - protein, 7 aa, Artificial Sequence
  Synthetic
EVSKRPS

SEQ ID NO: 547 - protein, 11 aa, Artificial Sequence
  Synthetic
LSYTGGRTYVG

SEQ ID NO: 548 - protein, 117 aa, Artificial Sequence; identical to SEQ ID NO: 540
  Synthetic

SEQ ID NO: 549 - protein, 111 aa, Artificial Sequence
  Synthetic
QSALTQPPSVSGSPGQSITISCTGTSNDVGGYNYVSWYQQHPGKAPKLMIYEVSKRPSGVPDRFSGSKSGNTASLTISGLQAEDEADYYCLSYTGGRTYVGFGCGTKLTVL

SEQ ID NO: 550 - protein, 5 aa, Artificial Sequence
  Synthetic
TYTIS

SEQ ID NO: 551 - protein, 17 aa, Artificial Sequence
  Synthetic
GIIPILGAPNYAQKFQG

SEQ ID NO: 552 - protein, 6 aa, Artificial Sequence
  Synthetic
DPFSRY

SEQ ID NO: 553 - protein, 16 aa, Artificial Sequence
  Synthetic
RSSQSLLHSNGYNYLD

SEQ ID NO: 554 - protein, 7 aa, Artificial Sequence
  Synthetic
LGSNRAS

SEQ ID NO: 555 - protein, 9 aa, Artificial Sequence
  Synthetic
MQALQTPRT

SEQ ID NO: 556 - protein, 115 aa, Artificial Sequence
  Synthetic
QVQLVQSGAEVKKPGSSVKVSCKVSGGTFSTYTISWVRQAPGQCLEWMGGIIPILGAPNYAQKFQGRVSITADESTSTSYMELTSLRSEDTAVYYCARDPFSRYWGQGTLVTVSS

SEQ ID NO: 557 - protein, 112 aa, Artificial Sequence
  Synthetic
EIVMTQSPLSLPVTPGEPASISCRSSQSLLHSNGYNYLDWYLQKPGQSPQLLIYLGSNRASGVPDRFSGSGSGTDFTLKISRVEAEDVGVYYCMQALQTPRTFGCGTKVEIK

SEQ ID NO: 558 - protein, 5 aa, Artificial Sequence
  Synthetic
SYAII

SEQ ID NO: 559 - protein, 17 aa, Artificial Sequence
  Synthetic
GIIPMFGTANYAQKFQG

SEQ ID NO: 560 - protein, 9 aa, Artificial Sequence
  Synthetic
VSGTYHWGY

SEQ ID NO: 561 - protein, 14 aa, Artificial Sequence
  Synthetic
TGTSSDVGGYNYVS

SEQ ID NO: 562 - protein, 7 aa, Artificial Sequence
  Synthetic
DVSARPS

SEQ ID NO: 563 - protein, 10 aa, Artificial Sequence
  Synthetic
SSYISITTLV

SEQ ID NO: 564 - protein, 118 aa, Artificial Sequence
  Synthetic
QVQLVQSGAEVKKPGSSVKVSCKASGGTFRSYAIIWVRQAPGQCLEWMGGIIPMFGTANYAQKFQGRVTITADESTSTAYMELSRLRSEDTAVYYCARVSGTYHWGYWGQGTLVTVSS

SEQ ID NO: 565 - protein, 110 aa, Artificial Sequence
  Synthetic
QSALTQPASVSGSPGQSITISCTGTSSDVGGYNYVSWYQQRPGRAPKLMIYDVSARPSGVSNRFSGSKSGNTASLTISGLQAEDEADYYCSSYISITTLVFGCGTKLTVL

SEQ ID NO: 566 - protein, 5 aa, Artificial Sequence
  Synthetic
RYDMH

SEQ ID NO: 567 - protein, 17 aa, Artificial Sequence
  Synthetic
IISYDGSIRYYADSVKG

SEQ ID NO: 568 - protein, 8 aa, Artificial Sequence
  Synthetic
RAGFQFDS

SEQ ID NO: 569 - protein, 14 aa, Artificial Sequence
  Synthetic
TGTSSDVGGYNYVS

SEQ ID NO: 570 - protein, 7 aa, Artificial Sequence
  Synthetic
EVSKRPA

SEQ ID NO: 571 - protein, 11 aa, Artificial Sequence
  Synthetic
SSYAGGNNFVV

SEQ ID NO: 572 - protein, 117 aa, Artificial Sequence
  Synthetic
QVQLVESGGGVVQPGRSLRLSCAASGFTFSRYDMHWVRQAPGQCLEWMAIISYDGSIRYYADSVKGRFTISRDNSRNTLYLQMNSLRAEDTAVYYCVKRAGFQFDSWGQGTLVTVSS

SEQ ID NO: 573 - protein, 111 aa, Artificial Sequence
  Synthetic
QSALTQPPSASGSPGQSVTISCTGTSSDVGGYNYVSWYQQHPGKAPKLMIYEVSKRPAGVPDRFSGSKSGNTASLTVSGLQAEDEADYYCSSYAGGNNFVVFGCGTKLTVL

SEQ ID NO: 574 - protein, 5 aa, Artificial Sequence
  Synthetic
EYWMS

SEQ ID NO: 575 - protein, 17 aa, Artificial Sequence
  Synthetic
EIIPDSSKINYTPSLKD

SEQ ID NO: 576 - protein, 12 aa, Artificial Sequence
  Synthetic
PLYYGYDEGFAY

SEQ ID NO: 577 - protein, 16 aa, Artificial Sequence
  Synthetic
RSSQSLVHSNGNTYLE

SEQ ID NO: 578 - protein, 7 aa, Artificial Sequence
  Synthetic
KVSNRFS

SEQ ID NO: 579 - protein, 9 aa, Artificial Sequence
  Synthetic
FQGSHVPYT

SEQ ID NO: 580 - protein, 121 aa, Artificial Sequence
  Synthetic
EVQLVESGGGLVQPGRSLKLSCAASGFDFSEYWMSWVRQAPGKCLEWIGEIIPDSSKINYTPSLKDKFIISRDNAKNTLYLQMSKVRSEDTALYYCARPLYYGYDEGFAYWGQGTTVTVSS

SEQ ID NO: 581 - protein, 112 aa, Artificial Sequence
  Synthetic
EIVMTQTPLSLPVSLGDQASISCRSSQSLVHSNGNTYLEWYLQKPGQSPKLLIYKVSNRFSGVPDRFSGSGSGTDFTLKISRVEAEDLGVYYCFQGSHVPYTFGCGTRLEIK

SEQ ID NO: 582 - protein, 5 aa, Artificial Sequence
  Synthetic
SYAMH

SEQ ID NO: 583 - protein, 19 aa, Artificial Sequence
  Synthetic
RVRSKSDNYATYYADSVKD

SEQ ID NO: 584 - protein, 14 aa, Artificial Sequence
  Synthetic
PLFTTVEVTNALDY

SEQ ID NO: 585 - protein, 12 aa, Artificial Sequence
  Synthetic
SASSSISSNYLH

SEQ ID NO: 586 - protein, 7 aa, Artificial Sequence
  Synthetic
RTSVLSS

SEQ ID NO: 587 - protein, 9 aa, Artificial Sequence
  Synthetic
QQGSSMPFT

SEQ ID NO: 588 - protein, 125 aa, Artificial Sequence
  Synthetic
EVQLVESGGGLVQPKGSLKLSCAASGFTFNSYAMHWVRQAPGRCMEWVGRVRSKSDNYATYYADSVKDRFTISRDDSQSMLYLQMNNLKTEDTAIYYCVRPLFTTVEVTNALDYWGQGTLVTVSS

SEQ ID NO: 589 - protein, 108 aa, Artificial Sequence
  Synthetic
EIVLTQSPTTMAASPGEKITITCSASSSISSNYLHWYQQKPGFSPKLLIYRTSVLSSGVPARFSGSGSGTSYSLTIDTMEAEDVATYFCQQGSSMPFTFGCGTRLEIK

SEQ ID NO: 590 - protein, 5 aa, Artificial Sequence
  Synthetic
NYWMQ

SEQ ID NO: 591 - protein, 17 aa, Artificial Sequence
  Synthetic
AIYPGEGETRYTQKFKG

SEQ ID NO: 592 - protein, 12 aa, Artificial Sequence
  Synthetic
PYAGYYLYAMDQ

SEQ ID NO: 593 - protein, 16 aa, Artificial Sequence
  Synthetic
RSSQSIVHSNGNTYLE

SEQ ID NO: 594 - protein, 7 aa, Artificial Sequence
  Synthetic
KVSNRFS

SEQ ID NO: 595 - protein, 9 aa, Artificial Sequence
  Synthetic
SQSTHVPYT

SEQ ID NO: 596 - protein, 121 aa, Artificial Sequence
  Synthetic
QVQLVQSGAELARPGASVKLSCKASGYIFSNYWMQWVKQRPGQCLEWIGAIYPGEGETRYTQKFKGKATLTADTSSSTAYMQLSSLASEDSAVYYCARPYAGYYLYAMDQWGQGTTVTVSS

SEQ ID NO: 597 - protein, 112 aa, Artificial Sequence
  Synthetic
EIVMTQTPLSLPVSLGDQASISCRSSQSIVHSNGNTYLEWYLQKPGQSPKLLIYKVSNRFSGVPDRFSGSGSGTDFTLKISRVEAEDLGVYFCSQSTHVPYTFGCGTRLEIK

SEQ ID NO: 598 - protein, 5 aa, Artificial Sequence
  Synthetic
NYDMN

SEQ ID NO: 599 - protein, 17 aa, Artificial Sequence
  Synthetic
VISYDGSNKYYTDSVKG

SEQ ID NO: 600 - protein, 8 aa, Artificial Sequence
  Synthetic
RGATPVDY

SEQ ID NO: 601 - protein, 16 aa, Artificial Sequence
  Synthetic
RSSQSLLHSNGYNYLG

SEQ ID NO: 602 - protein, 7 aa, Artificial Sequence
  Synthetic
FGSSRAS

SEQ ID NO: 603 - protein, 9 aa, Artificial Sequence
  Synthetic
MQALQTPFT

SEQ ID NO: 604 - protein, 117 aa, Artificial Sequence
  Synthetic
QVQLVESGGGVVQPGRSLRLSCAASGFTFSNYDMNWVRQAPGKCLEWVAVISYDGSNKYYTDSVKGRFTISRDNSKNTLYLQMNSLRTEDTAVYYCAKRGATPVDYWGQGTLVTVSS

SEQ ID NO: 605 - protein, 112 aa, Artificial Sequence
  Synthetic
EIVMTQSPLSLPVTPGEPASISCRSSQSLLHSNGYNYLGWYLQKPGQSPQLLIYFGSSRASGVPDRFSGSGSGTDFTLKISGVEAEDVGVYYCMQALQTPFTFGCGTKVDIK

SEQ ID NO: 606 - protein, 5 aa, Artificial Sequence
  Synthetic
RYDMH

SEQ ID NO: 607 - protein, 17 aa, Artificial Sequence
  Synthetic
FISYDGSNEDYPDAVKG

SEQ ID NO: 608 - protein, 8 aa, Artificial Sequence
  Synthetic
VGASPFDY

SEQ ID NO: 609 - protein, 14 aa, Artificial Sequence
  Synthetic
TGTSSDVGGYNYVS

SEQ ID NO: 610 - protein, 7 aa, Artificial Sequence
  Synthetic
EVSKRPS

SEQ ID NO: 611 - protein, 10 aa, Artificial Sequence
  Synthetic
TSYAGSNNLV

SEQ ID NO: 612 - protein, 117 aa, Artificial Sequence
  Synthetic
QVQLVESGGGVVQPGRSLRLSCAASGFTFSRYDMHWVRQAPGKCLEWVAFISYDGSNEDYPDAVKGRFTISRDNSKNTLYLQMNSLRAEDTAVYYCAKVGASPFDYWGQGTLVTVSS

SEQ ID NO: 613 - protein, 110 aa, Artificial Sequence
  Synthetic
QSALTQPASVSGSPGRSVTISCTGTSSDVGGYNYVSWYQQHPGKAPKLMIYEVSKRPSGVPVRFSGSKSDNTASLTVSGLQAEDEADYYCTSYAGSNNLVFGCGTKLTVL

SEQ ID NO: 614 - protein, 5 aa, Artificial Sequence
  Synthetic
NYDMN

SEQ ID NO: 615 - protein, 17 aa, Artificial Sequence
  Synthetic
VISYDGSQKSYSDSVKG

SEQ ID NO: 616 - protein, 8 aa, Artificial Sequence
  Synthetic
RGATPFDY

SEQ ID NO: 617 - protein, 11 aa, Artificial Sequence
  Synthetic
SGDKLGDKYAS

SEQ ID NO: 618 - protein, 7 aa, Artificial Sequence
  Synthetic
QDSRRPS

SEQ ID NO: 619 - protein, 11 aa, Artificial Sequence
  Synthetic
QVWDYSSDHWV

SEQ ID NO: 620 - protein, 117 aa, Artificial Sequence
  Synthetic
QVQLVESGGGVVQPGRSLRLSCAASGFTFRNYDMNWVRQAPGKCLEWVAVISYDGSQKSYSDSVKGRFTISRDNSKNTLSLQMNSLRNEDSAVYYCAKRGATPFDYWGQGTLVTVSS

SEQ ID NO: 621 - protein, 108 aa, Artificial Sequence
  Synthetic
SYELTQPPSVSVSPGQTASITCSGDKLGDKYASWYQQKPGQSPVLVIYQDSRRPSGIPERFSGSNSGNTATLTISGTQAMDEADYYCQVWDYSSDHWVFGCGTKLTVL

SEQ ID NO: 622 - protein, 5 aa, Artificial Sequence
  Synthetic
NYDMN

SEQ ID NO: 623 - protein, 17 aa, Artificial Sequence
  Synthetic
VISYDGSDKHYTDSVKG

SEQ ID NO: 624 - protein, 8 aa, Artificial Sequence
  Synthetic
RGATPVDY

SEQ ID NO: 625 - protein, 12 aa, Artificial Sequence
  Synthetic
SASSSISSNSLH

SEQ ID NO: 626 - protein, 7 aa, Artificial Sequence
  Synthetic
RTSNLAS

SEQ ID NO: 627 - protein, 9 aa, Artificial Sequence
  Synthetic
QQGSSIPRT

SEQ ID NO: 628 - protein, 117 aa, Artificial Sequence
  Synthetic
QVQLVESGGGVVQPGRSLRLSCAASGFTFRNYDMNWVRQAPGKCLEWVAVISYDGSDKHYTDSVKGRFTISRDNSKNTLFLQMNSLRTEDTAVYYCAKRGATPVDYWGQGTLVTVSS

SEQ ID NO: 629 - protein, 108 aa, Artificial Sequence
  Synthetic
EIQMTQSPSSLSASVGDRVTITCSASSSISSNSLHWYQQKPGKAPKLLIYRTSNLASGVPSRFSGSGSGTDFTLTISSLQPEDFATYYCQQGSSIPRTFGCGTKLEIK

SEQ ID NO: 630 - protein, 5 aa, Artificial Sequence
  Synthetic
RYDMN

SEQ ID NO: 631 - protein, 17 aa, Artificial Sequence
  Synthetic
FISYDGSNEDYPDAVKG

SEQ ID NO: 632 - protein, 8 aa, Artificial Sequence
  Synthetic
VGASPFDY

SEQ ID NO: 633 - protein, 12 aa, Artificial Sequence
  Synthetic
RASQSVSSSYLA

SEQ ID NO: 634 - protein, 7 aa, Artificial Sequence
  Synthetic
GASSRAT

SEQ ID NO: 635 - protein, 9 aa, Artificial Sequence
  Synthetic
QQYGSSPRT

SEQ ID NO: 636 - protein, 117 aa, Artificial Sequence
  Synthetic
QVQLVESGGGVVQPGRSLRLSCAASGFTFSRYDMNWVRQAPGKCLEWVAFISYDGSNEDYPDAVKGRFTISRDNSKNTLYLQLNSLRAEDTAVYYCAKVGASPFDYWGQGTLVTVSS

SEQ ID NO: 637 - protein, 108 aa, Artificial Sequence
  Synthetic
EIVLTQSPGTLSLSPGERATLSCRASQSVSSSYLAWYQQKPGQAPRLLIYGASSRATGIPDRFSGSGSGTDFTLTISRLEPEDFAVYYCQQYGSSPRTFGCGTKVEIK

SEQ ID NO: 638 - protein, 5 aa, Artificial Sequence
  Synthetic
NYDMN

SEQ ID NO: 639 - protein, 17 aa, Artificial Sequence
  Synthetic
VISYDGSNKYYTDSVKG

SEQ ID NO: 640 - protein, 8 aa, Artificial Sequence
  Synthetic
RGATPFDY

SEQ ID NO: 641 - protein, 11 aa, Artificial Sequence
  Synthetic
RASQSVNSNLA

SEQ ID NO: 642 - protein, 7 aa, Artificial Sequence
  Synthetic
GASTRAT

SEQ ID NO: 643 - protein, 9 aa, Artificial Sequence
  Synthetic
QQYNNWPYT

SEQ ID NO: 644 - protein, 117 aa, Artificial Sequence
  Synthetic
QVQLVESGGGVVLPGRSLRLSCAASGFTFRNYDMNWVRQAPGKCLEWVAVISYDGSNKYYTDSVKGRFTISRDNSRNTLYLQMNSLRTEDTAVYSCTKRGATPFDYWGQGTLVTVSS

SEQ ID NO: 645 - protein, 107 aa, Artificial Sequence
  Synthetic
EIVLTQSPATLSVSPGERATLSCRASQSVNSNLAWYQQKPGQAPRLLIYGASTRATGIPARFSGSGSGTEFTLTISSLQSEDFAVYYCQQYNNWPYTFGCGTKLEIK

SEQ ID NO: 646 - protein, 5 aa, Artificial Sequence
  Synthetic
NYDMN

SEQ ID NO: 647 - protein, 17 aa, Artificial Sequence
  Synthetic
VISYDGSDKHYTDSVKG

SEQ ID NO: 648 - protein, 8 aa, Artificial Sequence
  Synthetic
RGATPVDY

SEQ ID NO: 649 - protein, 16 aa, Artificial Sequence
  Synthetic
RSSQSLLHSNGYNYLD

SEQ ID NO: 650 - protein, 7 aa, Artificial Sequence
  Synthetic
LGSNRAS

SEQ ID NO: 651 - protein, 9 aa, Artificial Sequence
  Synthetic
MQALQAPLT

SEQ ID NO: 652 - protein, 117 aa, Artificial Sequence; identical to SEQ ID NO: 492
  Synthetic

SEQ ID NO: 653 - protein, 112 aa, Artificial Sequence
  Synthetic
EIVMTQTPLSLPVTPGEPASISCRSSQSLLHSNGYNYLDWYLQKPGQSPQLLIYLGSNRASGVPDRFSGSGSGTDFTLKISRVEAEDVGVYYCMQALQAPLTFGCGTKVDIK

SEQ ID NO: 654 - protein, 5 aa, Artificial Sequence
  Synthetic
RYDMN

SEQ ID NO: 655 - protein, 17 aa, Artificial Sequence
  Synthetic
FISYDGSNEDYPDAVKG

SEQ ID NO: 656 - protein, 8 aa, Artificial Sequence
  Synthetic
VGASPFDY

SEQ ID NO: 657 - protein, 16 aa, Artificial Sequence
  Synthetic
RSSQSLLHSNGYNYLG

SEQ ID NO: 658 - protein, 7 aa, Artificial Sequence
  Synthetic
SGSSRAS

SEQ ID NO: 659 - protein, 9 aa, Artificial Sequence
  Synthetic
MQALQTPFT

SEQ ID NO: 660 - protein, 117 aa, Artificial Sequence; identical to SEQ ID NO: 540
  Synthetic

SEQ ID NO: 661 - protein, 112 aa, Artificial Sequence
  Synthetic
EIVMTQSPLSLPVTPGEPASISCRSSQSLLHSNGYNYLGWYLQKPGQSPQLLIYSGSSRASGVPDRFSGSGSGTDFTLKISRVEAEDVGVYYCMQALQTPFTFGCGTKVEIK

SEQ ID NO: 662 - protein, 5 aa, Artificial Sequence
  Synthetic
RYYMH

SEQ ID NO: 663 - protein, 17 aa, Artificial Sequence
  Synthetic
VIWHDGSNKYYADSVKG

SEQ ID NO: 664 - protein, 7 aa, Artificial Sequence
  Synthetic
EAPSLAY

SEQ ID NO: 665 - protein, 12 aa, Artificial Sequence
  Synthetic
RASQSVSSSYLA

SEQ ID NO: 666 - protein, 7 aa, Artificial Sequence
  Synthetic
GASSRAT

SEQ ID NO: 667 - protein, 9 aa, Artificial Sequence
  Synthetic
QQYGSSPLT

SEQ ID NO: 668 - protein, 116 aa, Artificial Sequence
  Synthetic
QVQLVESGGGVVQPGRSLRLSCAASGFTFSRYYMHWVRQAPGKCPEWVAVIWHDGSNKYYADSVKGRFTISRDNSKNTLYLQMNSLRAEDTAVYYCAREAPSLAYWGQGTLVTVSS

SEQ ID NO: 669 - protein, 108 aa, Artificial Sequence
  Synthetic
EIVLTQSPGTLSLSPGERATLSCRASQSVSSSYLAWYQQKPGQAPRLLIYGASSRATGIPDRFSGSGSGTDFTLTISRLEPEDFAVYYCQQYGSSPLTFGCGTKVEIK

SEQ ID NO: 670 - protein, 5 aa, Artificial Sequence
  Synthetic
RYYMH

SEQ ID NO: 671 - protein, 17 aa, Artificial Sequence
  Synthetic
VIWHDGSNKYYADSVKG

SEQ ID NO: 672 - protein, 7 aa, Artificial Sequence
  Synthetic
EAPSLAY

SEQ ID NO: 673 - protein, 12 aa, Artificial Sequence
  Synthetic
RASQSVSSSYLA

SEQ ID NO: 674 - protein, 7 aa, Artificial Sequence
  Synthetic
GASSRAT

SEQ ID NO: 675 - protein, 8 aa, Artificial Sequence
  Synthetic
QQYGSSIT

SEQ ID NO: 676 - protein, 116 aa, Artificial Sequence; identical to SEQ ID NO: 668
  Synthetic

SEQ ID NO: 677 - protein, 107 aa, Artificial Sequence
  Synthetic
EIVMTQSPGTLSLSPGERATLSCRASQSVSSSYLAWYQQKPGQAPRLLIYGASSRATGIPDRFSGSGSGTDFTLTISRLEPEDFAVYYCQQYGSSITFGCGTRLEIK

SEQ ID NO: 678 - protein, 5 aa, Artificial Sequence
  Synthetic
RYYMH

SEQ ID NO: 679 - protein, 17 aa, Artificial Sequence
  Synthetic
VIWHDGSNKYYADSVKG

SEQ ID NO: 680 - protein, 7 aa, Artificial Sequence
  Synthetic
EAPSLAY

SEQ ID NO: 681 - protein, 12 aa, Artificial Sequence
  Synthetic
RASQSVSSSYLA

SEQ ID NO: 682 - protein, 7 aa, Artificial Sequence
  Synthetic
GASSRAT

SEQ ID NO: 683 - protein, 9 aa, Artificial Sequence
  Synthetic
QQYGSSPWT

SEQ ID NO: 684 - protein, 116 aa, Artificial Sequence; identical to SEQ ID NO: 668
  Synthetic

SEQ ID NO: 685 - protein, 108 aa, Artificial Sequence
  Synthetic
EIVLTQSPGTLSLSPGERATLSCRASQSVSSSYLAWYQQKPGQAPRLLIYGASSRATGIPDRFSGSGSGTDFTLTISRLEPEDFAVYYCQQYGSSPWTFGCGTKVEIK

SEQ ID NO: 686 - protein, 5 aa, Artificial Sequence
  Synthetic
SYYWS

SEQ ID NO: 687 - protein, 16 aa, Artificial Sequence
  Synthetic
RVYTSGSTDYNPSLKS

SEQ ID NO: 688 - protein, 11 aa, Artificial Sequence
  Synthetic
DSGNFWGFLDH

SEQ ID NO: 689 - protein, 16 aa, Artificial Sequence
  Synthetic
RSSQSLLHSNGYNYLD

SEQ ID NO: 690 - protein, 7 aa, Artificial Sequence
  Synthetic
LGSNRAS

SEQ ID NO: 691 - protein, 9 aa, Artificial Sequence
  Synthetic
MQALQTPWT

SEQ ID NO: 692 - protein, 119 aa, Artificial Sequence
  Synthetic
QVQLQESGPGLVKPSETLSLTCTVSGGSISSYYWSWIRQPAGKCLEWIGRVYTSGSTDYNPSLKSRVTMSLDTSKSQFSLKLRSVTAADTAVYYCARDSGNFWGFLDHWGQGTLVTVSS

SEQ ID NO: 693 - protein, 112 aa, Artificial Sequence
  Synthetic
EIVLTQSPLSLPVTPGEPASISCRSSQSLLHSNGYNYLDWYLQKPGQSPQLLIYLGSNRASGVPDRFSGSGSGTDFTLKISRVEAEDVGIYYCMQALQTPWTFGCGTKVEIK

SEQ ID NO: 694 - protein, 5 aa, Artificial Sequence
  Synthetic
NYDMN

SEQ ID NO: 695 - protein, 17 aa, Artificial Sequence
  Synthetic
VISYDGSNKYYTDSVKG

SEQ ID NO: 696 - protein, 8 aa, Artificial Sequence
  Synthetic
RGATPFDY

SEQ ID NO: 697 - protein, 14 aa, Artificial Sequence
  Synthetic
TGTNSDVGSYNLVS

SEQ ID NO: 698 - protein, 7 aa, Artificial Sequence
  Synthetic
DVSHRPS

SEQ ID NO: 699 - protein, 10 aa, Artificial Sequence
  Synthetic
SSYISSSSLV

SEQ ID NO: 700 - protein, 117 aa, Artificial Sequence
  Synthetic
EVQLLESGGGLVQPGGSLRLSCAASGFTFRNYDMNWVRQAPGKCLEWVAVISYDGSNKYYTDSVKGRFTISRDNSRNTLYLQMNSLRTEDTAVYSCTKRGATPFDYWGQGTLVTVSS

SEQ ID NO: 701 - protein, 110 aa, Artificial Sequence
  Synthetic
QSALTQPPSVSGSPGQSITISCTGTNSDVGSYNLVSWYQQHPGKTPKLMIYDVSHRPSGVSNRFSGSKSGNTASLTISGLQAEDEADYYCSSYISSSSLVFGCGTKLTVL

SEQ ID NO: 702 - protein, 5 aa, Artificial Sequence
  Synthetic
NYDMN

SEQ ID NO: 703 - protein, 17 aa, Artificial Sequence
  Synthetic
VISYDGSQKSYSDSVKG

SEQ ID NO: 704 - protein, 8 aa, Artificial Sequence
  Synthetic
RGATPFDY

SEQ ID NO: 705 - protein, 11 aa, Artificial Sequence
  Synthetic
GGNNIGSKNVH

SEQ ID NO: 706 - protein, 7 aa, Artificial Sequence
  Synthetic
RDSKRPS

SEQ ID NO: 707 - protein, 9 aa, Artificial Sequence
  Synthetic
QAWDRSTAV

SEQ ID NO: 708 - protein, 117 aa, Artificial Sequence
  Synthetic
EVQLLESGGGSAQPGGSLRLSCVASGFTFRNYDMNWVRQAPGKCLEWVAVISYDGSQKSYSDSVKGRFTISRDNSKNTLSLQMNSLRNEDTAVYYCAKRGATPFDYWGQGTLVTVSS

SEQ ID NO: 709 - protein, 106 aa, Artificial Sequence
  Synthetic
SYELTQPPSVSVAPGQTARITCGGNNIGSKNVHWYQQKPGQAPVLVIYRDSKRPSGIPERFSGSNSGNTATLTISGTQAMDEADYYCQAWDRSTAVFGCGTKLTVL

SEQ ID NO: 710 - protein, 5 aa, Artificial Sequence
  Synthetic
NYDMN

SEQ ID NO: 711 - protein, 17 aa, Artificial Sequence
  Synthetic
VISYDGSNKYYSDSVKG

SEQ ID NO: 712 - protein, 8 aa, Artificial Sequence
  Synthetic
RGATPFDY

SEQ ID NO: 713 - protein, 14 aa, Artificial Sequence
  Synthetic
TGTSSDVGGYNYVS

SEQ ID NO: 714 - protein, 7 aa, Artificial Sequence
  Synthetic
DVSVRPS

SEQ ID NO: 715 - protein, 10 aa, Artificial Sequence
  Synthetic
SSYISSTTLV

SEQ ID NO: 716 - protein, 117 aa, Artificial Sequence
  Synthetic
QVQLVESGGGVVQPGRSLRLSCAASGFTFRNYDMNWVRQAPGKCLEWVAVISYDGSNKYYSDSVKGRFTISRDNSKNTLSLQMNSLRNEDTAVYYCAKRGATPFDYWGQGTLVTVSS

SEQ ID NO: 717 - protein, 110 aa, Artificial Sequence
  Synthetic
QSALTQPPSASGSPGQSITISCTGTSSDVGGYNYVSWYQQHPGKAPKLMIYDVSVRPSGVSNRFSGSKSGNTASLTISGLQAEDEADYYCSSYISSTTLVFGCGTKLTVL

SEQ ID NO: 718 - protein, 5 aa, Artificial Sequence
  Synthetic
NYDMN

SEQ ID NO: 719 - protein, 17 aa, Artificial Sequence
  Synthetic
VISYDGSQKSYSDSVKG

SEQ ID NO: 720 - protein, 8 aa, Artificial Sequence
  Synthetic
RGATPFDY

SEQ ID NO: 721 - protein, 14 aa, Artificial Sequence
  Synthetic
TGTSSDVGGYNYVS

SEQ ID NO: 722 - protein, 7 aa, Artificial Sequence
  Synthetic
DVSVRPS

SEQ ID NO: 723 - protein, 10 aa, Artificial Sequence
  Synthetic
SSYISSTTLV

SEQ ID NO: 724 - protein, 117 aa, Artificial Sequence
  Synthetic
QVQLVESGGGVVQPGRSLRLSCAASGFTFRNYDMNWVRQAPGKCLEWVAVISYDGSQKSYSDSVKGRFTISRDNSKNTLSLQMNSLRNEDTAVYYCAKRGATPFDYWGQGTLVTVSS

SEQ ID NO: 725 - protein, 110 aa, Artificial Sequence; identical to SEQ ID NO: 717
  Synthetic

SEQ ID NO: 726 - protein, 5 aa, Artificial Sequence
  Synthetic
GYYMH

SEQ ID NO: 727 - protein, 17 aa, Artificial Sequence
  Synthetic
WINPNSGGTNYAQKFQG

SEQ ID NO: 728 - protein, 10 aa, Artificial Sequence
  Synthetic
TGALAGALKH

SEQ ID NO: 729 - protein, 16 aa, Artificial Sequence
  Synthetic
RSSQSLLHSNGYNYLD

SEQ ID NO: 730 - protein, 7 aa, Artificial Sequence
  Synthetic
LGSNRAS

SEQ ID NO: 731 - protein, 9 aa, Artificial Sequence
  Synthetic
MQALQTPFT

SEQ ID NO: 732 - protein, 119 aa, Artificial Sequence
  Synthetic
QVQLVQSGAEVKKPGASVKVSCKASGYTFTGYYMHWVRQAPGQCLEWMGWINPNSGGTNYAQKFQGRITMTRDTSISTAYMELSRLRSDDTAVYYCARTGALAGALKHWGQGTLVTVSS

SEQ ID NO: 733 - protein, 112 aa, Artificial Sequence
  Synthetic
EIVMTQSPLSLPVTPGEPASISCRSSQSLLHSNGYNYLDWYLQKPGQSPQLLIYLGSNRASGVPDRFSGSGSGTDFTLKISRVEAEDVGVYYCMQALQTPFTFGCGTKVEIK

SEQ ID NO: 734 - protein, 5 aa, Artificial Sequence
  Synthetic
NYDMN

SEQ ID NO: 735 - protein, 17 aa, Artificial Sequence
  Synthetic
VISYDGSDKHYTDSVKG

SEQ ID NO: 736 - protein, 8 aa, Artificial Sequence
  Synthetic
RGATPVDY

SEQ ID NO: 737 - protein, 14 aa, Artificial Sequence
  Synthetic
TGTNSDVGGYNYVS

SEQ ID NO: 738 - protein, 7 aa, Artificial Sequence
  Synthetic
DVSKRPS

SEQ ID NO: 739 - protein, 10 aa, Artificial Sequence
  Synthetic
SSYISSSSLV

SEQ ID NO: 740 - protein, 117 aa, Artificial Sequence; identical to SEQ ID NO: 492
  Synthetic

SEQ ID NO: 741 - protein, 110 aa, Artificial Sequence
  Synthetic
QSALTQPASVSGSPGRSVTISCTGTNSDVGGYNYVSWYQQHPGKAPKLMIYDVSKRPSGVSNRFSGSKSGNTASLTISGLQAEDEADYYCSSYISSSSLVFGCGTKLTVL

SEQ ID NO: 742 - protein, 5 aa, Artificial Sequence
  Synthetic
NYDMN

SEQ ID NO: 743 - protein, 17 aa, Artificial Sequence
  Synthetic
VISYDGSQKSYSDSVKG

SEQ ID NO: 744 - protein, 8 aa, Artificial Sequence
  Synthetic
RGATPFDY

SEQ ID NO: 745 - protein, 11 aa, Artificial Sequence
  Synthetic
GGNNIGSKSVH

SEQ ID NO: 746 - protein, 7 aa, Artificial Sequence
  Synthetic
QDSKRPS

SEQ ID NO: 747 - protein, 9 aa, Artificial Sequence
  Synthetic
QAWDSSTAV

SEQ ID NO: 748 - protein, 117 aa, Artificial Sequence; identical to SEQ ID NO: 724
  Synthetic

SEQ ID NO: 749 - protein, 106 aa, Artificial Sequence
  Synthetic
SYELTQPPSVSVAPGQTARITCGGNNIGSKSVHWYQQKPGQSPVLVIYQDSKRPSGIPDRFSGSNSGNTATLTISGTQAMDEADYYCQAWDSSTAVFGCGTKLTVL

SEQ ID NO: 750 - protein, 7 aa, Artificial Sequence
  Synthetic
SNSAAWN

SEQ ID NO: 751 - protein, 18 aa, Artificial Sequence
  Synthetic
RTYYRSKWYNDYAVSVKS

SEQ ID NO: 752 - protein, 13 aa, Artificial Sequence
  Synthetic
AIFVVPAAMRFDY

SEQ ID NO: 753 - protein, 16 aa, Artificial Sequence
  Synthetic
RSSQSLLHSNGYNYLD

SEQ ID NO: 754 - protein, 7 aa, Artificial Sequence
  Synthetic
LGSNRAS

SEQ ID NO: 755 - protein, 8 aa, Artificial Sequence
  Synthetic
MQALQTPT

SEQ ID NO: 756 - protein, 125 aa, Artificial Sequence
  Synthetic
QVQLQQSGPGLVKPSQTLSLTCAISGDSVSSNSAAWNWIRQSPSRCLEWLGRTYYRSKWYNDYAVSVKSRITINPDISKNQFSLQLNSVTPEDTAVYYCARAIFVVPAAMRFDYWGQGTLVTVSS

SEQ ID NO: 757 - protein, 111 aa, Artificial Sequence
  Synthetic
EIVMTQSPLSLPVTPGEPASISCRSSQSLLHSNGYNYLDWYLQKPGQSPQLLIYLGSNRASGVPDRFSGSGSGTDFTLKISRVEAEDVGVYYCMQALQTPTFGCGTKVDIK

SEQ ID NO: 758 - protein, 5 aa, Artificial Sequence
  Synthetic
SNYMS

SEQ ID NO: 759 - protein, 16 aa, Artificial Sequence
  Synthetic
VIYSSGNTYYADSVKG

SEQ ID NO: 760 - protein, 8 aa, Artificial Sequence
  Synthetic
GSYYAFDI

SEQ ID NO: 761 - protein, 14 aa, Artificial Sequence
  Synthetic
GLSSGSVSTTYYPS

SEQ ID NO: 762 - protein, 7 aa, Artificial Sequence
  Synthetic
STNTRSS

SEQ ID NO: 763 - protein, 10 aa, Artificial Sequence
  Synthetic
VLYMGSGIWV

SEQ ID NO: 764 - protein, 116 aa, Artificial Sequence
  Synthetic
EVQLVESGGGLIQPGGSLRLSCAVSGFTVSSNYMSWVRQAPGKCLEWVSVIYSSGNTYYADSVKGRFTISRDNSKNTLYLQMNSLRAEDTAVYYCASGSYYAFDIWGQGTMVTVSS

SEQ ID NO: 765 - protein, 110 aa, Artificial Sequence
  Synthetic
QTVVTQEPSLTVSPGGTVTLTCGLSSGSVSTTYYPSWYQQTPGQAPRTLIYSTNTRSSGVPDRFSGSILGNKAALTITGAQADDESDYYCVLYMGSGIWVFGCGTKLTVL

SEQ ID NO: 766 - protein, 5 aa, Artificial Sequence
  Synthetic
NAWMS

SEQ ID NO: 767 - protein, 19 aa, Artificial Sequence
  Synthetic
RIKTKTDGGTTDYAAPVKG

SEQ ID NO: 768 - protein, 12 aa, Artificial Sequence
  Synthetic
DFRIMGATWFDP

SEQ ID NO: 769 - protein, 11 aa, Artificial Sequence
  Synthetic
SGDKLGDKYAS

SEQ ID NO: 770 - protein, 7 aa, Artificial Sequence
  Synthetic
QHSRRPS

SEQ ID NO: 771 - protein, 9 aa, Artificial Sequence
  Synthetic
QAWDSSTVV

SEQ ID NO: 772 - protein, 123 aa, Artificial Sequence
  Synthetic
EVQLVESGGGLVKPGGSLRLSCAASGFTFSNAWMSWVRQAPGKCLEWVGRIKTKTDGGTTDYAAPVKGRFTISRDDSKNTLYLQMNSLKTEDTAVYYCTTDFRIMGATWFDPWGQGTLVTVSS

SEQ ID NO: 773 - protein, 106 aa, Artificial Sequence
  Synthetic
SYELTQPPSVSVSPGQTASITCSGDKLGDKYASWYQQKPGQSPVLVIYQHSRRPSGIPERFSGSNSGNTATLTISGTQAMDEADYYCQAWDSSTVVFGCGTKLTVL

SEQ ID NO: 774 - protein, 5 aa, Artificial Sequence
  Synthetic
SYSMN

SEQ ID NO: 775 - protein, 17 aa, Artificial Sequence
  Synthetic
SISSRSSYIHYADSVKG

SEQ ID NO: 776 - protein, 8 aa, Artificial Sequence
  Synthetic
VQRAGLDY

SEQ ID NO: 777 - protein, 14 aa, Artificial Sequence
  Synthetic
TGSSSDVGNYNLVS

SEQ ID NO: 778 - protein, 7 aa, Artificial Sequence
  Synthetic
EVSNRPS

SEQ ID NO: 779 - protein, 10 aa, Artificial Sequence
  Synthetic
SSYTSSSTWV

SEQ ID NO: 780 - protein, 117 aa, Artificial Sequence
  Synthetic
EVQLVESGGGLVKPGGSLRLSCAASGFTFSSYSMNWVRQAPGKCLEWVSSISSRSSYIHYADSVKGRFTISRDNAKNSLNLQMNSLRAEDTAVYYCARVQRAGLDYWGQGTLVTVSS

SEQ ID NO: 781 - protein, 110 aa, Artificial Sequence
  Synthetic
QSALTQPASVSGSPGQSITISCTGSSSDVGNYNLVSWYQQHPGKAPKLMISEVSNRPSGVSDRFSGSKSGNTASLTISGLQAEDEADYYCSSYTSSSTWVFGCGTKLTVL

SEQ ID NO: 782 - protein, 7 aa, Artificial Sequence
  Synthetic
SSSYYWG

SEQ ID NO: 783 - protein, 16 aa, Artificial Sequence
  Synthetic
SIYYSGSTNYNPSLKS

SEQ ID NO: 784 - protein, 9 aa, Artificial Sequence
  Synthetic
PSNYDAFDI

SEQ ID NO: 785 - protein, 14 aa, Artificial Sequence
  Synthetic
TGSSSNIGAGYDVH

SEQ ID NO: 786 - protein, 7 aa, Artificial Sequence
  Synthetic
GNSNRPS

SEQ ID NO: 787 - protein, 11 aa, Artificial Sequence
  Synthetic
QSYDSSLGGWV

SEQ ID NO: 788 - protein, 119 aa, Artificial Sequence
  Synthetic
QVQLQESGPGLVKPSETLSLTCTVSGGSLSSSSYYWGWIRQPPGKCLEWIGSIYYSGSTNYNPSLKSRVTISADTSKNQFSLKLSSVTAADTAVYYCARPSNYDAFDIWGQGTMVTVSS

SEQ ID NO: 789 - protein, 111 aa, Artificial Sequence
  Synthetic
QSVLTQPPSVSGAPGQRVTISCTGSSSNIGAGYDVHWYQQLPGTAPKLLIYGNSNRPSGVPDRFSGSKSGTSASLAITGLQAEDEADYYCQSYDSSLGGWVFGCGTKLTVL

SEQ ID NO: 790 - protein, 7 aa, Artificial Sequence
  Synthetic
SGGFFWS

SEQ ID NO: 791 - protein, 16 aa, Artificial Sequence
  Synthetic
YIYYSGSTYYNPSLRS

SEQ ID NO: 792 - protein, 11 aa, Artificial Sequence
  Synthetic
DPGSYRVWFDP

SEQ ID NO: 793 - protein, 11 aa, Artificial Sequence
  Synthetic
RASQNIKNYLN

SEQ ID NO: 794 - protein, 7 aa, Artificial Sequence
  Synthetic
DASSLQS

SEQ ID NO: 795 - protein, 9 aa, Artificial Sequence
  Synthetic
QQSYSTPFT

SEQ ID NO: 796 - protein, 121 aa, Artificial Sequence
  Synthetic
QVQLQESGPGLVKPSQTLSLTCTVSGGSISSGGFFWSWIRQHPGKCLEWIGYIYYSGSTYYNPSLRSRVTISVDTSKNQFSLKLSSVTAADTAVYYCARDPGSYRVWFDPWGQGTLVTVSS

SEQ ID NO: 797 - protein, 107 aa, Artificial Sequence
  Synthetic
EIQMTQSPSSLSASVGDRVTITCRASQNIKNYLNWYQQKPGRAPKLLIYDASSLQSGDPSRFSGSGSGTDFTLTISSLQPEDFATYYCQQSYSTPFTFGCGTKVEIK

SEQ ID NO: 798 - protein, 5 aa, Artificial Sequence
  Synthetic
DHYMS

SEQ ID NO: 799 - protein, 17 aa, Artificial Sequence
  Synthetic
YISNSGSIIYYVDSVKG

SEQ ID NO: 800 - protein, 8 aa, Artificial Sequence
  Synthetic
DVRTAFDY

SEQ ID NO: 801 - protein, 11 aa, Artificial Sequence
  Synthetic
RASQSIGSWLA

SEQ ID NO: 802 - protein, 7 aa, Artificial Sequence
  Synthetic
AASSLQS

SEQ ID NO: 803 - protein, 9 aa, Artificial Sequence
  Synthetic
QQANSFPPT

SEQ ID NO: 804 - protein, 117 aa, Artificial Sequence
  Synthetic
QVQLVESGGGLVKPGGSLRLSCAASGFTFSDHYMSWIRQAPGKCLEWISYISNSGSIIYYVDSVKGRFTISRDNAKNSLYLQMNSLRAEDTAVYYCARDVRTAFDYWGQGTLVTVSS

SEQ ID NO: 805 - protein, 107 aa, Artificial Sequence
  Synthetic
EIQMTQSPSSVSASVGDRVTITCRASQSIGSWLAWYQQKPGKAPNLLIYAASSLQSGVPSRFSGSGSGTDFTLTISSLQPEDFATYYCQQANSFPPTFGCGTKVEIK

SEQ ID NO: 806 - protein, 7 aa, Artificial Sequence
  Synthetic
SSSYFWG

SEQ ID NO: 807 - protein, 16 aa, Artificial Sequence
  Synthetic
NIYYSGSSNYNPSLKS

SEQ ID NO: 808 - protein, 11 aa, Artificial Sequence
  Synthetic
LPRGDRDAFDI

SEQ ID NO: 809 - protein, 11 aa, Artificial Sequence
  Synthetic
RASQGISNYLA

SEQ ID NO: 810 - protein, 7 aa, Artificial Sequence
  Synthetic
AASTLQS

SEQ ID NO: 811 - protein, 9 aa, Artificial Sequence
  Synthetic
QQSYSTPFT

SEQ ID NO: 812 - protein, 121 aa, Artificial Sequence; identical to SEQ ID NO: 92
  Synthetic

SEQ ID NO: 813 - protein, 107 aa, Artificial Sequence; identical to SEQ ID NO: 94
  Synthetic

SEQ ID NO: 814 - protein, 7 aa, Artificial Sequence
  Synthetic
SSSYFWG

SEQ ID NO: 815 - protein, 16 aa, Artificial Sequence
  Synthetic
NIYYSGSSNYNPSLKS

SEQ ID NO: 816 - protein, 11 aa, Artificial Sequence
  Synthetic
LPRGDRDAFDI

SEQ ID NO: 817 - protein, 11 aa, Artificial Sequence
  Synthetic
RASQGISNYLA

SEQ ID NO: 818 - protein, 7 aa, Artificial Sequence
  Synthetic
AASTLQS

SEQ ID NO: 819 - protein, 9 aa, Artificial Sequence
  Synthetic
QQSYSTPFT

SEQ ID NO: 820 - protein, 121 aa, Artificial Sequence; identical to SEQ ID NO: 92
  Synthetic

SEQ ID NO: 821 - protein, 107 aa, Artificial Sequence
  Synthetic
EIQMTQSPSSLSASVGDRVTITCRASQGISNYLAWYQQKPGKVPKLLIYAASTLQSGVPSRFSGSGSGTDFTLTISSLQPEDFATYYCQQSYSTPFTFGCGTKVEIK

SEQ ID NO: 822 - protein, 7 aa, Artificial Sequence
  Synthetic
SGGHFWS

SEQ ID NO: 823 - protein, 16 aa, Artificial Sequence
  Synthetic
YIYYSGSTYSTPSLTS

SEQ ID NO: 824 - protein, 9 aa, Artificial Sequence
  Synthetic
EGQSGSFDI

SEQ ID NO: 825 - protein, 14 aa, Artificial Sequence
  Synthetic
TGTSSDVGGSDYVS

SEQ ID NO: 826 - protein, 7 aa, Artificial Sequence
  Synthetic
EVSNRPS

SEQ ID NO: 827 - protein, 10 aa, Artificial Sequence
  Synthetic
SSYTTTGTLV

SEQ ID NO: 828 - protein, 119 aa, Artificial Sequence
  Synthetic
QVQLQESGPGLVKPSQTLSLTCTVSGGSISSGGHFWSWIRQHPGKCLEWIGYIYYSGSTYSTPSLTSRVTMSRDTSKNQFSLKLSSVTAADTAVYYCAREGQSGSFDIWGQGTMVTVSS

SEQ ID NO: 829 - protein, 110 aa, Artificial Sequence
  Synthetic
QSALTQPASVSGSPGQSITISCTGTSSDVGGSDYVSWYRQHPGKAPKLIIYEVSNRPSGVSNRFSGSKSGNTASLTISGLQAEDEADYYCSSYTTTGTLVFGCGTKLTVL

SEQ ID NO: 830 - protein, 5 aa, Artificial Sequence
  Synthetic
SYGMH

SEQ ID NO: 831 - protein, 17 aa, Artificial Sequence
  Synthetic
VIWKDGNNKYYADSVKG

SEQ ID NO: 832 - protein, 10 aa, Artificial Sequence
  Synthetic
GLNYYYGMDV

SEQ ID NO: 833 - protein, 13 aa, Artificial Sequence
  Synthetic
TRSNGGIANNYVQ

SEQ ID NO: 834 - protein, 7 aa, Artificial Sequence
  Synthetic
ENNQRPS

SEQ ID NO: 835 - protein, 10 aa, Artificial Sequence
  Synthetic
QSYDGSHHVV

SEQ ID NO: 836 - protein, 119 aa, Artificial Sequence
  Synthetic
QVQLVESGGGVVQPGRSLRLSCAASGFTFSSYGMHWVRQAPGKCLEWVAVIWKDGNNKYYADSVKGRFTISRDNSKNTLYLQMNSLRAEDTAVYYCARGLNYYYGMDVWGQGTTVTVSS

SEQ ID NO: 837 - protein, 111 aa, Artificial Sequence
  Synthetic
NFMLTQPHSVSESPGKTATISCTRSNGGIANNYVQWYQQRPGSSPTIVIYENNQRPSGVPDRFSGSIDSSSNSASLTISGLKTEDEADYYCQSYDGSHHVVFGCGTKLTVL

SEQ ID NO: 838 - protein, 5 aa, Artificial Sequence
  Synthetic
GYYIH

SEQ ID NO: 839 - protein, 17 aa, Artificial Sequence
  Synthetic
WINPKSGGTHYAQKFQG

SEQ ID NO: 840 - protein, 19 aa, Artificial Sequence
  Synthetic
AEARLAARQEYYYFYGMDV

SEQ ID NO: 841 - protein, 11 aa, Artificial Sequence
  Synthetic
SGDKLGDKYAS

SEQ ID NO: 842 - protein, 7 aa, Artificial Sequence
  Synthetic
QDSKRPS

SEQ ID NO: 843 - protein, 9 aa, Artificial Sequence
  Synthetic
QAWDSSTVV

SEQ ID NO: 844 - protein, 128 aa, Artificial Sequence
  Synthetic
QVQLVQSGAEVKKPGASVKVSCKASGYTFTGYYIHWVRQAPGQCLEWMGWINPKSGGTHYAQKFQGRVTMTRDTSISTAYMELSRLRSDDTAVYYCARAEARLAARQEYYYFYGMDVWGQGTTVTVSS

SEQ ID NO: 845 - protein, 106 aa, Artificial Sequence
  Synthetic
SYELTQPASVSVSPGQTASITCSGDKLGDKYASWYQQKPGQSPVLVIYQDSKRPSGIPERFSGSNSGNTATLTISGTQAMDEADYYCQAWDSSTVVFGCGTKLTVL

SEQ ID NO: 846 - protein, 7 aa, Artificial Sequence
  Synthetic
SGAYFWS

SEQ ID NO: 847 - protein, 16 aa, Artificial Sequence
  Synthetic
YIYYSGSTYTNPSLRD

SEQ ID NO: 848 - protein, 9 aa, Artificial Sequence
  Synthetic
EGAGYVFDI

SEQ ID NO: 849 - protein, 14 aa, Artificial Sequence
  Synthetic
TGTSSDVGGYNYVS

SEQ ID NO: 850 - protein, 7 aa, Artificial Sequence
  Synthetic
EVSNRPS

SEQ ID NO: 851 - protein, 11 aa, Artificial Sequence
  Synthetic
QVWDSSSDHVV

SEQ ID NO: 852 - protein, 119 aa, Artificial Sequence
  Synthetic
QVQLQESGPGLVKPSQTLSLTCTVSGGSISSGAYFWSWIRQHPGKCLEWIGYIYYSGSTYTNPSLRDRLKISVDTSKNQFSLKLSSVTAADTAMYYCAREGAGYVFDIWGQGTMVTVSS

SEQ ID NO: 853 - protein, 111 aa, Artificial Sequence
  Synthetic
QSALTQPASVSGSPGQSITISCTGTSSDVGGYNYVSWYQQHPGKAPKLMIYEVSNRPSGVSNRFSGSKSGNTASLTISGLQAGDEADYFCQVWDSSSDHVVFGCGTKLTVL

SEQ ID NO: 854 - protein, 7 aa, Artificial Sequence
  Synthetic
SGGYYWN

SEQ ID NO: 855 - protein, 16 aa, Artificial Sequence
  Synthetic
YIFYSGITYSNPSLKS

SEQ ID NO: 856 - protein, 12 aa, Artificial Sequence
  Synthetic
GLVRGAPDAFDI

SEQ ID NO: 857 - protein, 11 aa, Artificial Sequence
  Synthetic
QASQDISNYLN

SEQ ID NO: 858 - protein, 7 aa, Artificial Sequence
  Synthetic
AASSLQG

SEQ ID NO: 859 - protein, 9 aa, Artificial Sequence
  Synthetic
QQSYSTPFT

SEQ ID NO: 860 - protein, 122 aa, Artificial Sequence
  Synthetic
QVQLQESGPGLVKPSQTLSLTCTVSGGSISSGGYYWNWIRQHPGQCLEWIGYIFYSGITYSNPSLKSLFTISLDTSKNQFSLKLSSVTAADTAVYYCARGLVRGAPDAFDIWGQGTMVTVSS

SEQ ID NO: 861 - protein, 107 aa, Artificial Sequence
  Synthetic
EIQMTQSPSSLSASVGDRVTITCQASQDISNYLNWYQLKPGKAPKLLIQAASSLQGGVPSRFSGSGSGTDFTLTISSLQPEDFATYYCQQSYSTPFTFGCGTKVEIK

SEQ ID NO: 862 - protein, 5 aa, Artificial Sequence
  Synthetic
SYYWS

SEQ ID NO: 863 - protein, 16 aa, Artificial Sequence
  Synthetic
RIYYNGNTYYNPSLKS

SEQ ID NO: 864 - protein, 10 aa, Artificial Sequence
  Synthetic
PKLGIDAFDI

SEQ ID NO: 865 - protein, 14 aa, Artificial Sequence
  Synthetic
TGSSSNIGAGYDVH

SEQ ID NO: 866 - protein, 7 aa, Artificial Sequence
  Synthetic
GNSNRPS

SEQ ID NO: 867 - protein, 11 aa, Artificial Sequence
  Synthetic
QSHDSSLSGSV

SEQ ID NO: 868 - protein, 118 aa, Artificial Sequence
  Synthetic
QVQLQESGPGLVKPSETLSLTCTVSGGSISSYYWSWIRQPPGKCLEWIGRIYYNGNTYYNPSLKSRVTISGDTSKNQFSLKLSSVTAADTAVYYCARPKLGIDAFDIWGQGTMVTVSS

SEQ ID NO: 869 - protein, 111 aa, Artificial Sequence
  Synthetic
QSVLTQPPSVSGAPGQRVTISCTGSSSNIGAGYDVHWYQKLPGTAPKLLIYGNSNRPSGVPDRFSGSKSGTSASLAITGLQAEDEADYYCQSHDSSLSGSVFGCGTKLTVL

SEQ ID NO: 870 - protein, 7 aa, Artificial Sequence
  Synthetic
SGGYFWS

SEQ ID NO: 871 - protein, 16 aa, Artificial Sequence
  Synthetic
YIYYSGSTYTNPSLRD

SEQ ID NO: 872 - protein, 9 aa, Artificial Sequence
  Synthetic
EGAGYAFDI

SEQ ID NO: 873 - protein, 14 aa, Artificial Sequence
  Synthetic
TGTSSDVGGYNYVS

SEQ ID NO: 874 - protein, 7 aa, Artificial Sequence
  Synthetic
EVSNRPS

SEQ ID NO: 875 - protein, 10 aa, Artificial Sequence
  Synthetic
SSYTSSSTLV

SEQ ID NO: 876 - protein, 119 aa, Artificial Sequence
  Synthetic
QVQLQESGGGLVKPSETLSLTCTVSGGSISSGGYFWSWIRQHPGKCLEWIGYIYYSGSTYTNPSLRDRLKISVDTSKNQFSLKLSSVTAADTAMYYCAREGAGYAFDIWGQGTMVTVSS

SEQ ID NO: 877 - protein, 110 aa, Artificial Sequence
  Synthetic
QSALTQPASVSGSPGQSITISCTGTSSDVGGYNYVSWYQQHPGKAPKLMIYEVSNRPSGVSNRFSGSKSGNTASLTISGLQAEDEADYYCSSYTSSSTLVFGCGTKLTVL

SEQ ID NO: 878 - protein, 5 aa, Artificial Sequence
  Synthetic
SYGMH

SEQ ID NO: 879 - protein, 17 aa, Artificial Sequence
  Synthetic
VISYDGSNKYYADSVKG

SEQ ID NO: 880 - protein, 21 aa, Artificial Sequence
  Synthetic
EGAYFGSGSYYPLYYYYAMDV

SEQ ID NO: 881 - protein, 12 aa, Artificial Sequence
  Synthetic
RASQSVSSSYLA

SEQ ID NO: 882 - protein, 7 aa, Artificial Sequence
  Synthetic
GASIRAT

SEQ ID NO: 883 - protein, 9 aa, Artificial Sequence
  Synthetic
QQYGSSLFT

SEQ ID NO: 884 - protein, 130 aa, Artificial Sequence
  Synthetic
QVQLVESGGGVVQPGRSLRLSCAASGFTFSSYGMHWVRQAPGKCLEWVAVISYDGSNKYYADSVKGRFTISRDNSKNTLYLQMNSLRAEDTAVYYCAREGAYFGSGSYYPLYYYYAMDVWGQGTTVTVSS

SEQ ID NO: 885 - protein, 108 aa, Artificial Sequence
  Synthetic
EIVMTQSPGTLSLSPGERATLSCRASQSVSSSYLAWYQQKPGQAPRLLIYGASIRATGIPDRFSGSGSGTDFTLTISRLEPEDFAVYYCQQYGSSLFTFGCGTRLEIK

SEQ ID NO: 886 - protein, 5 aa, Artificial Sequence
  Synthetic
DHYMS

SEQ ID NO: 887 - protein, 17 aa, Artificial Sequence
  Synthetic
YISSSGSTIYYVDSVKG

SEQ ID NO: 888 - protein, 8 aa, Artificial Sequence
  Synthetic
DVRTAFDY

SEQ ID NO: 889 - protein, 11 aa, Artificial Sequence
  Synthetic
RASQGISSWLA

SEQ ID NO: 890 - protein, 7 aa, Artificial Sequence
  Synthetic
AASGLQS

SEQ ID NO: 891 - protein, 9 aa, Artificial Sequence
  Synthetic
QQANSFPPT

SEQ ID NO: 892 - protein, 117 aa, Artificial Sequence
  Synthetic
QVQLVESGGGLVKPGGSLRLSCAASGFTFSDHYMSWIRQTPGKCLEWVSYISSSGSTIYYVDSVKGRFTISRDNAKNSLYLQMNSLRAEDTAVYYCARDVRTAFDYWGQGTLVTVSS

SEQ ID NO: 893 - protein, 107 aa, Artificial Sequence
  Synthetic
EIQMTQSPSSVSASVGDRVTITCRASQGISSWLAWYQQKPGKAPKLLIYAASGLQSGVPSRFSGSGSGTDFTLTISSLQPEDFATYYCQQANSFPPTFGCGTKVEIK

SEQ ID NO: 894 - protein, 5 aa, Artificial Sequence
  Synthetic
SYTMS

SEQ ID NO: 895 - protein, 17 aa, Artificial Sequence
  Synthetic
AISGSGGNTYYADSVKG

SEQ ID NO: 896 - protein, 8 aa, Artificial Sequence
  Synthetic
VGRAALDY

SEQ ID NO: 897 - protein, 14 aa, Artificial Sequence
  Synthetic
TGTSSDVGSYNLVS

SEQ ID NO: 898 - protein, 7 aa, Artificial Sequence
  Synthetic
EVSKRPS

SEQ ID NO: 899 - protein, 10 aa, Artificial Sequence
  Synthetic
SSYTSSSTVV

SEQ ID NO: 900 - protein, 117 aa, Artificial Sequence
  Synthetic
EVQLLESGGGLVQPGGSPRLSCAVSGFTFSSYTMSWVRQAPGKCLEWVSAISGSGGNTYYADSVKGRSTISRDNSRNTLYLQMNSLRAEDTAVYYCAKVGRAALDYWGQGTLVTVSS

SEQ ID NO: 901 - protein, 110 aa, Artificial Sequence
  Synthetic
QSALTQPPSVSGSPGQSITISCTGTSSDVGSYNLVSWYQQHPGKAPKLMIYEVSKRPSGVSNRFSGSKSGNTASLTISGLQAEDEADYYCSSYTSSSTVVFGCGTKLTVL

SEQ ID NO: 902 - protein, 5 aa, Artificial Sequence
  Synthetic
SYAMS

SEQ ID NO: 903 - protein, 17 aa, Artificial Sequence
  Synthetic
AISGSGGSTYYADSVKG

SEQ ID NO: 904 - protein, 19 aa, Artificial Sequence
  Synthetic
EGYYDSSGYPLYYYFGMDV

SEQ ID NO: 905 - protein, 12 aa, Artificial Sequence
  Synthetic
RASQSVSSSYLA

SEQ ID NO: 906 - protein, 7 aa, Artificial Sequence
  Synthetic
GASSRAT

SEQ ID NO: 907 - protein, 10 aa, Artificial Sequence
  Synthetic
QRYGSSPIFT

SEQ ID NO: 908 - protein, 128 aa, Artificial Sequence
  Synthetic
EVQLLESGGGLVQPGGSLRLSCAASGFTFSSYAMSWVRQAPGKCLEWVSAISGSGGSTYYADSVKGRFTISRDNSKNTLYLQMNSLRAEDTAVYYCAREGYYDSSGYPLYYYFGMDVWGQGTTVTVSS

SEQ ID NO: 909 - protein, 109 aa, Artificial Sequence
  Synthetic
EIVLTQSPGTLSLSPGERATLSCRASQSVSSSYLAWYQQKPGQAPRLLIYGASSRATGIPDRFSGSGSGTDFTLTISRLEPEDFAVYYCQRYGSSPIFTFGCGTKVEIK

SEQ ID NO: 910 - protein, 5 aa, Artificial Sequence
  Synthetic
NAWMS

SEQ ID NO: 911 - protein, 19 aa, Artificial Sequence
  Synthetic
RIKTKTDGGTTDYAAPVKG

SEQ ID NO: 912 - protein, 12 aa, Artificial Sequence
  Synthetic
DFRIMGATWFDP

SEQ ID NO: 913 - protein, 13 aa, Artificial Sequence
  Synthetic
SGSSSNIGSYSVN

SEQ ID NO: 914 - protein, 7 aa, Artificial Sequence
  Synthetic
SNNQRPS

SEQ ID NO: 915 - protein, 13 aa, Artificial Sequence
  Synthetic
AAWDDSLSGRGVA

SEQ ID NO: 916 - protein, 123 aa, Artificial Sequence; identical to SEQ ID NO: 772
  Synthetic

SEQ ID NO: 917 - protein, 112 aa, Artificial Sequence
  Synthetic
QSVLTQPSSASGTPGQRVTISCSGSSSNIGSYSVNWYQQLPGTAPKLLIYSNNQRPSGVPDRFSGSKSGTSASLAISGLRSEDEADYYCAAWDDSLSGRGVAFGCGTKLTVL

SEQ ID NO: 918 - protein, 5 aa, Artificial Sequence
  Synthetic
DYYMS

SEQ ID NO: 919 - protein, 17 aa, Artificial Sequence
  Synthetic
YISSSGSMIYYIDSVKG

SEQ ID NO: 920 - protein, 8 aa, Artificial Sequence
  Synthetic
DLGPSFDY

SEQ ID NO: 921 - protein, 11 aa, Artificial Sequence
  Synthetic
RASQGIGSWLA

SEQ ID NO: 922 - protein, 7 aa, Artificial Sequence
  Synthetic
GASGLQS

SEQ ID NO: 923 - protein, 9 aa, Artificial Sequence
  Synthetic
QQANSFPRT

SEQ ID NO: 924 - protein, 117 aa, Artificial Sequence
  Synthetic
QVQLVESGGGLVKPGGSLRLSCAASGFTFSDYYMSWIRQAPGKCLEWISYISSSGSMIYYIDSVKGRFTISRDNAKNSLYLQMNSLRAEDTAVYYCARDLGPSFDYWGQGSLVTVSS

SEQ ID NO: 925 - protein, 107 aa, Artificial Sequence
  Synthetic
EIQMTQSPSSVAATVGDRVTITCRASQGIGSWLAWYQQKPGKAPKLLIYGASGLQSGVPSRFSGSGSGTDFTLTISSLQPEDFATYYCQQANSFPRTFGCGTKVEIK

SEQ ID NO: 926 - protein, 5 aa, Artificial Sequence
  Synthetic
DHYMS

SEQ ID NO: 927 - protein, 17 aa, Artificial Sequence
  Synthetic
YISNSGSTIYYADSVKG

SEQ ID NO: 928 - protein, 8 aa, Artificial Sequence
  Synthetic
DQRNAFDI

SEQ ID NO: 929 - protein, 11 aa, Artificial Sequence
  Synthetic
RASQGIGSWLA

SEQ ID NO: 930 - protein, 7 aa, Artificial Sequence
  Synthetic
AASGLQS

SEQ ID NO: 931 - protein, 9 aa, Artificial Sequence
  Synthetic
QQSYSNPLT

SEQ ID NO: 932 - protein, 117 aa, Artificial Sequence
  Synthetic
QVQLVESGGGLVKPGGSLRLSCAASGFTFSDHYMSWIRQAPGKCLEWISYISNSGSTIYYADSVKGRFTISRDNAKNSLYLQMNSLRAEDTAVYYCARDQRNAFDIWGQGTMVTVSS

SEQ ID NO: 933 - protein, 107 aa, Artificial Sequence
  Synthetic
AIQMTQSPSSLSASVGDRVTITCRASQGIGSWLAWYQQKPGKAPKLLIYAASGLQSGVPSRFSGSGSGTDFTLTISSLQPEDFATYYCQQSYSNPLTFGCGTKVEIK

SEQ ID NO: 934 - protein, 7 aa, Artificial Sequence
  Synthetic
SSSYYWG

SEQ ID NO: 935 - protein, 16 aa, Artificial Sequence
  Synthetic
SIYYSGTTRYNPSLRS

SEQ ID NO: 936 - protein, 10 aa, Artificial Sequence
  Synthetic
PGAGHDGFDI

SEQ ID NO: 937 - protein, 13 aa, Artificial Sequence
  Synthetic
SGSSSNIGSNYVY

SEQ ID NO: 938 - protein, 7 aa, Artificial Sequence
  Synthetic
DNNKRPS

SEQ ID NO: 939 - protein, 11 aa, Artificial Sequence
  Synthetic
AAWDDSLSGWV

SEQ ID NO: 940 - protein, 120 aa, Artificial Sequence
  Synthetic
QVQLQESGPGLLKPSETLSLTCTVSGGSISSSSYYWGWIRQPPGKCLEWIGSIYYSGTTRYNPSLRSRVTTSLDASKNRLSLQLSSVTAADTAVYYCARPGAGHDGFDIWGQGTMVTVSS

SEQ ID NO: 941 - protein, 110 aa, Artificial Sequence
  Synthetic
QSVLTQPPSASGTPGQRVTISCSGSSSNIGSNYVYWYQQLPGTAPKLLIYDNNKRPSGIPDRFSGSKSGTSASLAISGLRSEDEADYYCAAWDDSLSGWVFGCGTKLTVL

SEQ ID NO: 942 - protein, 5 aa, Artificial Sequence
  Synthetic
SYYWS

SEQ ID NO: 943 - protein, 16 aa, Artificial Sequence
  Synthetic
RIYSSGSANYNPSLKS

SEQ ID NO: 944 - protein, 17 aa, Artificial Sequence
  Synthetic
EGQWRVPAQYYYFGMDV

SEQ ID NO: 945 - protein, 12 aa, Artificial Sequence
  Synthetic
RASQSVSSSYLA

SEQ ID NO: 946 - protein, 7 aa, Artificial Sequence
  Synthetic
GASSRAT

SEQ ID NO: 947 - protein, 8 aa, Artificial Sequence
  Synthetic
QQYGSSIT

SEQ ID NO: 948 - protein, 125 aa, Artificial Sequence
  Synthetic
QVQLQESGPGLVKPSETLSLTCTVSGGSISSYYWSWIRQPAGKCLEWIGRIYSSGSANYNPSLKSRVTMSVDTSKNQFSLKLNSVTAADTAVYYCAREGQWRVPAQYYYFGMDVWGQGTTVTVSS

SEQ ID NO: 949 - protein, 107 aa, Artificial Sequence; identical to SEQ ID NO: 677
  Synthetic

SEQ ID NO: 950 - protein, 7 aa, Artificial Sequence
  Synthetic
SSSYFWV

SEQ ID NO: 951 - protein, 16 aa, Artificial Sequence
  Synthetic
SIYYSGSTYYNPSLKS

SEQ ID NO: 952 - protein, 11 aa, Artificial Sequence
  Synthetic
LPRGDRMTFDI

SEQ ID NO: 953 - protein, 12 aa, Artificial Sequence
  Synthetic
RASQSVSSSYLA

SEQ ID NO: 954 - protein, 7 aa, Artificial Sequence
  Synthetic
GASSRAT

SEQ ID NO: 955 - protein, 9 aa, Artificial Sequence
  Synthetic
QQYGSSPFT

SEQ ID NO: 956 - protein, 121 aa, Artificial Sequence; identical to SEQ ID NO: 101
  Synthetic

SEQ ID NO: 957 - protein, 108 aa, Artificial Sequence; identical to SEQ ID NO: 102
  Synthetic

SEQ ID NO: 958 - protein, 5 aa, Artificial Sequence
  Synthetic
SYGMH

SEQ ID NO: 959 - protein, 17 aa, Artificial Sequence
  Synthetic
VIWNRYSNKYYADAVKG

SEQ ID NO: 960 - protein, 10 aa, Artificial Sequence
  Synthetic
DVPYYYGMDV

SEQ ID NO: 961 - protein, 13 aa, Artificial Sequence
  Synthetic
TRSSGSIGDNYVQ

SEQ ID NO: 962 - protein, 7 aa, Artificial Sequence
  Synthetic
ENNQRPS

SEQ ID NO: 963 - protein, 9 aa, Artificial Sequence
  Synthetic
QSYHGSNVV

SEQ ID NO: 964 - protein, 119 aa, Artificial Sequence
  Synthetic
QVQLVESGGGVVLPGRSLRLSCAASGFPFSSYGMHWVRQAPGKCLEWVAVIWNRYSNKYYADAVKGRFTISRDNSKNTLYLQMNSLRAEDTAVYYCARDVPYYYGMDVWGQGTTVTVSS

SEQ ID NO: 965 - protein, 110 aa, Artificial Sequence
  Synthetic
NFMLTQPHSVSESPGKTVIISCTRSSGSIGDNYVQWYQQRPGSSPTTVIYENNQRPSGVPDRFSGSIDSSSNSASLTISGLKTEDEADYYCQSYHGSNVVFGCGTKLTVL

SEQ ID NO: 966 - protein, 5 aa, Artificial Sequence
  Synthetic
SYGMH

SEQ ID NO: 967 - protein, 17 aa, Artificial Sequence
  Synthetic
VIWNDASNKYYADAVKG

SEQ ID NO: 968 - protein, 10 aa, Artificial Sequence
  Synthetic
DVPYYYGMDV

SEQ ID NO: 969 - protein, 13 aa, Artificial Sequence
  Synthetic
TRSSGSIGDNYVQ

SEQ ID NO: 970 - protein, 7 aa, Artificial Sequence
  Synthetic
ENNQRPS

SEQ ID NO: 971 - protein, 9 aa, Artificial Sequence
  Synthetic
QSYQQSNVV

SEQ ID NO: 972 - protein, 119 aa, Artificial Sequence
  Synthetic
QVQLVESGGGVVLPGRSLRLSCAASGFPFSSYGMHWVRQAPGKCLEWVAVIWNDASNKYYADAVKGRFTISRDNSKNTLYLQMNSLRAEDTAVYYCARDVPYYYGMDVWGQGTTVTVSS

SEQ ID NO: 973 - protein, 110 aa, Artificial Sequence
  Synthetic
NFMLTQPHSVSESPGKTVIISCTRSSGSIGDNYVQWYQQRPGSSPTTVIYENNQRPSGVPDRFSGSIDSSSNSASLTISGLKTEDEADYYCQSYQQSNVVFGCGTKLTVL

SEQ ID NO: 974 - protein, 5 aa, Artificial Sequence
  Synthetic
SYAMS

SEQ ID NO: 975 - protein, 17 aa, Artificial Sequence
  Synthetic
AISGSGEFSYYAAAVKG

SEQ ID NO: 976 - protein, 12 aa, Artificial Sequence
  Synthetic
VRNYYGSGSLDY

SEQ ID NO: 977 - protein, 12 aa, Artificial Sequence
  Synthetic
RASQSVSSTYLA

SEQ ID NO: 978 - protein, 7 aa, Artificial Sequence
  Synthetic
GASIRAT

SEQ ID NO: 979 - protein, 8 aa, Artificial Sequence
  Synthetic
QQYGSSLT

SEQ ID NO: 980 - protein, 121 aa, Artificial Sequence; identical to SEQ ID NO: 141
  Synthetic

SEQ ID NO: 981 - protein, 107 aa, Artificial Sequence; identical to SEQ ID NO: 118
  Synthetic

SEQ ID NO: 982 - protein, 5 aa, Artificial Sequence
  Synthetic
SYAMS

SEQ ID NO: 983 - protein, 17 aa, Artificial Sequence
  Synthetic
AISGSGEQWYYAPSVKG

SEQ ID NO: 984 - protein, 12 aa, Artificial Sequence
  Synthetic
VRNYYGSGSLDY

SEQ ID NO: 985 - protein, 12 aa, Artificial Sequence
  Synthetic
RASQSFSSAYLA

SEQ ID NO: 986 - protein, 7 aa, Artificial Sequence
  Synthetic
GASIRAT

SEQ ID NO: 987 - protein, 8 aa, Artificial Sequence
  Synthetic
QQYGSSLT

SEQ ID NO: 988 - protein, 121 aa, Artificial Sequence; identical to SEQ ID NO: 109
  Synthetic

SEQ ID NO: 989 - protein, 107 aa, Artificial Sequence; identical to SEQ ID NO: 110
  Synthetic

SEQ ID NO: 990 - protein, 5 aa, Artificial Sequence
  Synthetic
SYAMS

SEQ ID NO: 991 - protein, 17 aa, Artificial Sequence
  Synthetic
AISGSGGSTYYAPSVKG

SEQ ID NO: 992 - protein, 19 aa, Artificial Sequence
  Synthetic
EGYYPVSGYPLYYYFGMDV

SEQ ID NO: 993 - protein, 12 aa, Artificial Sequence
  Synthetic
RASQSVSSSYLA

SEQ ID NO: 994 - protein, 7 aa, Artificial Sequence
  Synthetic
GASSRAT

SEQ ID NO: 995 - protein, 10 aa, Artificial Sequence
  Synthetic
QQYGSSPIFT

SEQ ID NO: 996 - protein, 128 aa, Artificial Sequence
  Synthetic
EVQLLESGGGLVQPGGSLRLSCAASGFTFSSYAMSWVRQAPGKCLEWVSAISGSGGSTYYAPSVKGRFTISRDNSKNTLYLQMNSLRAEDTAVYYCAKEGYYPVSGYPLYYYFGMDVWGQGTTVTVSS

SEQ ID NO: 997 - protein, 109 aa, Artificial Sequence; identical to SEQ ID NO: 126
  Synthetic

SEQ ID NO: 998 - protein, 5 aa, Artificial Sequence
  Synthetic
SYAMS

SEQ ID NO: 999 - protein, 17 aa, Artificial Sequence
  Synthetic
AISGSGGSTYYAGNVKG

SEQ ID NO: 1000 - protein, 19 aa, Artificial Sequence
  Synthetic
EGYYPTSGYPLYYYFGMDV

SEQ ID NO: 1001 - protein, 12 aa, Artificial Sequence
  Synthetic
RASQSVSSSYLA

SEQ ID NO: 1002 - protein, 7 aa, Artificial Sequence
  Synthetic
GASSRAT

SEQ ID NO: 1003 - protein, 10 aa, Artificial Sequence
  Synthetic
QQYGSSPIFT

SEQ ID NO: 1004 - protein, 128 aa, Artificial Sequence
  Synthetic
EVQLLESGGGLVQPGGSLRLSCAASGFTFSSYAMSWVRQAPGKCLEWVSAISGSGGSTYYAGNVKGRFTISRDNSKNTLYLQMNSLRAEDTAVYYCAKEGYYPTSGYPLYYYFGMDVWGQGTTVTVSS

SEQ ID NO: 1005 - protein, 109 aa, Artificial Sequence; identical to SEQ ID NO: 126
  Synthetic

SEQ ID NO: 1006 - protein, 5 aa, Artificial Sequence
  Synthetic
SYGMH

SEQ ID NO: 1007 - protein, 17 aa, Artificial Sequence
  Synthetic
VIGSRESNKNYAESVKG

SEQ ID NO: 1008 - protein, 17 aa, Artificial Sequence
  Synthetic
ALRIAVAASYYYYGLDV

SEQ ID NO: 1009 - protein, 11 aa, Artificial Sequence
  Synthetic
RASQSVRSFLN

SEQ ID NO: 1010 - protein, 7 aa, Artificial Sequence
  Synthetic
TASSLQS

SEQ ID NO: 1011 - protein, 9 aa, Artificial Sequence
  Synthetic
QQSYEMPIT

SEQ ID NO: 1012 - protein, 126 aa, Artificial Sequence
  Synthetic
QVQLVESGGGVVQPGRSLRLSCAASGFTFSSYGMHWVRQAPGKCLEWVAVIGSRESNKNYAESVKGRFTISRDNSKNTLYLQMNSLRAEDTAVYYCASALRIAVAASYYYYGLDVWGQGTTVTVSS

SEQ ID NO: 1013 - protein, 107 aa, Artificial Sequence
  Synthetic
EIQMTQSPSSLSASVGDRVTITCRASQSVRSFLNWYQQKPGKAPKLLIFTASSLQSGVPSRFSGSGSGTDFTLTISSLQPEDFATYYCQQSYEMPITFGCGTRLEIK

SEQ ID NO: 1014 - protein, 5 aa, Artificial Sequence
  Synthetic
SYGMG

SEQ ID NO: 1015 - protein, 17 aa, Artificial Sequence
  Synthetic
VISYEASNKYYAEAVKG

SEQ ID NO: 1016 - protein, 21 aa, Artificial Sequence
  Synthetic
EGAHFGSGSYYPLYYYYAMDV

SEQ ID NO: 1017 - protein, 12 aa, Artificial Sequence
  Synthetic
RASQSVSSSYLA

SEQ ID NO: 1018 - protein, 7 aa, Artificial Sequence
  Synthetic
GASIRAT

SEQ ID NO: 1019 - protein, 10 aa, Artificial Sequence
  Synthetic
QQYGSSPIFT

SEQ ID NO: 1020 - protein, 130 aa, Artificial Sequence
  Synthetic
QVQLVESGGGVVQPGRSLRLSCAASGFTFSSYGMGWVRQAPGKCLEWVAVISYEASNKYYAEAVKGRFTISRDNSKNTLYLQMNSLRAEDTAVYYCAREGAHFGSGSYYPLYYYYAMDVWGQGTTVTVSS

SEQ ID NO: 1021 - protein, 109 aa, Artificial Sequence
  Synthetic
EIVLTQSPGTLSLSPGERATLSCRASQSVSSSYLAWYQQKPGQAPRLLIYGASIRATGIPDRFSGSGSGTDFTLTISRLEPEDFAVYYCQQYGSSPIFTFGCGTKVEIK

SEQ ID NO: 1022 - protein, 5 aa, Artificial Sequence
  Synthetic
DYYMT

SEQ ID NO: 1023 - protein, 17 aa, Artificial Sequence
  Synthetic
YISSSGSTIYYAEAVKG

SEQ ID NO: 1024 - protein, 8 aa, Artificial Sequence
  Synthetic
DRNSHFDY

SEQ ID NO: 1025 - protein, 11 aa, Artificial Sequence
  Synthetic
RASQGIRTWLA

SEQ ID NO: 1026 - protein, 7 aa, Artificial Sequence
  Synthetic
GASGLQS

SEQ ID NO: 1027 - protein, 9 aa, Artificial Sequence
  Synthetic
QQAESFPRT

SEQ ID NO: 1028 - protein, 117 aa, Artificial Sequence; identical to SEQ ID NO: 83
  Synthetic

SEQ ID NO: 1029 - protein, 107 aa, Artificial Sequence
  Synthetic
EIQMTQSPSSVSASVGDRVTITCRASQGIRTWLAWYQQKPGKAPKLLIYGASGLQSGVPSRFSGSGSGTDFTLTISSLQPEDFATYYCQQAESFPRTFGCGTKVEIK

SEQ ID NO: 1030 - protein, 5 aa, Artificial Sequence
  Synthetic
GYYIH

SEQ ID NO: 1031 - protein, 17 aa, Artificial Sequence
  Synthetic
WINPNSGGTNYAQKFQG

SEQ ID NO: 1032 - protein, 17 aa, Artificial Sequence
  Synthetic
VEAVAGREYYYFSGMDV

SEQ ID NO: 1033 - protein, 11 aa, Artificial Sequence
  Synthetic
SGEKLGDKYVY

SEQ ID NO: 1034 - protein, 7 aa, Artificial Sequence
  Synthetic
QSTKRPS

SEQ ID NO: 1035 - protein, 9 aa, Artificial Sequence
  Synthetic
QAYHASTAV

SEQ ID NO: 1036 - protein, 126 aa, Artificial Sequence; identical to SEQ ID NO: 149
  Synthetic

SEQ ID NO: 1037 - protein, 106 aa, Artificial Sequence; identical to SEQ ID NO: 150
  Synthetic

SEQ ID NO: 1038 - protein, 5 aa, Artificial Sequence
  Synthetic
SYAMS

SEQ ID NO: 1039 - protein, 17 aa, Artificial Sequence
  Synthetic
AISGSGEFSYYAAAVKG

SEQ ID NO: 1040 - protein, 12 aa, Artificial Sequence
  Synthetic
VRNYYGSGSLDY

SEQ ID NO: 1041 - protein, 12 aa, Artificial Sequence
  Synthetic
RASQSVSSTYLA

SEQ ID NO: 1042 - protein, 7 aa, Artificial Sequence
  Synthetic
GASIRAT

SEQ ID NO: 1043 - protein, 8 aa, Artificial Sequence
  Synthetic
QQYQSSLT

SEQ ID NO: 1044 - protein, 121 aa, Artificial Sequence; identical to SEQ ID NO: 141
  Synthetic

SEQ ID NO: 1045 - protein, 107 aa, Artificial Sequence; identical to SEQ ID NO: 142
  Synthetic

SEQ ID NO: 1046 - protein, 5 aa, Artificial Sequence
  Synthetic
SYGMH

SEQ ID NO: 1047 - protein, 17 aa, Artificial Sequence
  Synthetic
FIWYEGSNKYYAESVKD

SEQ ID NO: 1048 - protein, 16 aa, Artificial Sequence
  Synthetic
RAGIIGTIGYYYGMDV

SEQ ID NO: 1049 - protein, 11 aa, Artificial Sequence
  Synthetic
SGDRLGEKYTS

SEQ ID NO: 1050 - protein, 7 aa, Artificial Sequence
  Synthetic
QDTKRPS

SEQ ID NO: 1051 - protein, 9 aa, Artificial Sequence
  Synthetic
QAWESSTVV

SEQ ID NO: 1052 - protein, 125 aa, Artificial Sequence
  Synthetic
QVQLVESGGGVVQPGGSLRLSCAASGFTFSSYGMHWVRQAPGKCLEWVAFIWYEGSNKYYAESVKDRFTISRDNSKNTLYLQMNSLRAEDTAVYYCARRAGIIGTIGYYYGMDVWGQGTTVTVSS

SEQ ID NO: 1053 - protein, 107 aa, Artificial Sequence
  Synthetic
SYELTQPPSVSVSPGQTASITCSGDRLGEKYTSWYQQRPGQSPLLVIYQDTKRPSGIPERFSGSNSGNTATLTISGTQAMDEADYYCQAWESSTVVFGCGTKLTVLS

SEQ ID NO: 1054 - protein, 7 aa, Artificial Sequence
  Synthetic
SNSVIWN

SEQ ID NO: 1055 - protein, 18 aa, Artificial Sequence
  Synthetic
RTYYRSKWYNDYAVSVKS

SEQ ID NO: 1056 - protein, 9 aa, Artificial Sequence
  Synthetic
TVYYYGMDV

SEQ ID NO: 1057 - protein, 11 aa, Artificial Sequence
  Synthetic
SGDKLGNNYAA

SEQ ID NO: 1058 - protein, 7 aa, Artificial Sequence
  Synthetic
QDSKRPS

SEQ ID NO: 1059 - protein, 9 aa, Artificial Sequence
  Synthetic
QSWDSSTVV

SEQ ID NO: 1060 - protein, 121 aa, Artificial Sequence
  Synthetic
QVQLQQSGPGLVKPSQTLSLTCAISGDSVSSNSVIWNWIRQSPSRGLEWLGRTYYRSKWYNDYAVSVKSRITINPDTSKNQFSLQLNSVTPEDTAVYYCAGTVYYYGMDVWGQGATVTVSS

SEQ ID NO: 1061 - protein, 108 aa, Artificial Sequence
  Synthetic
SYELTQPPSVSVSPGQTGSITCSGDKLGNNYAAWYQQKPGQSPVLVIYQDSKRPSGIPERFSGSNSGNTATLTISGTQAVDEADYYCQSWDSSTVVFGGGTKLTVLGS

SEQ ID NO: 1062 - protein, 7 aa, Artificial Sequence
  Synthetic
SGANYWT

SEQ ID NO: 1063 - protein, 16 aa, Artificial Sequence
  Synthetic
YIYYSGSTYLNPSLRG

SEQ ID NO: 1064 - protein, 10 aa, Artificial Sequence
  Synthetic
ESGSSYGFDY

SEQ ID NO: 1065 - protein, 11 aa, Artificial Sequence
  Synthetic
RTSQSITSYLN

SEQ ID NO: 1066 - protein, 7 aa, Artificial Sequence
  Synthetic
ASSSLQS

SEQ ID NO: 1067 - protein, 9 aa, Artificial Sequence
  Synthetic
QQSYSGPFT

SEQ ID NO: 1068 - protein, 120 aa, Artificial Sequence
  Synthetic
QVQLQESGPGLVKPSQTLSLTCTVSGGSISSGANYWTWIRQHPGKGLEWIGYIYYSGSTYLNPSLRGRVTMSVDTSKNQFSLKLSSVTAADTAVYYCARESGSSYGFDYWGQGTLVTVSS

SEQ ID NO: 1069 - protein, 109 aa, Artificial Sequence
  Synthetic
DIQMTQSPSSLSASVGDRVTITCRTSQSITSYLNWYQQKPGQAPKLLIYASSSLQSGVPSRFSGSGSGTDFTLTISSLQPEDFATYYCQQSYSGPFTFGPGTKVDIKRS

SEQ ID NO: 1070 - DNA, 4425 bp, Artificial Sequence
  Synthetic
caggttcagttggttcagtctggcgccgaagtgaagaaaccaggcgcttctgtgaaggtgtcctgcaaggcctctggctacacctttaccaactactggatgaactgggtccgacaggctcctggccagtgtctggaatggatgggcaatatcgcttacggcgtgaagggcaccaactacaaccagaaattccagggcagagtgaccatgaccgtggacacctcttcctccaccgcctacatggaactgtcccggctgagatctgacgacaccgccgtgtactactgcgccaccagatacttctacgtgatggactattggggccagggcaccctggttacagtttcttctggcggcggaggacaaggcggtggtggtcaaggcggaggcggacaggatatccagatgacccagtctccttccagcctgtctgcctctgtgggcgacagagtgacaatcacctgtcgggcctctcaggacatctccaactacctgaactggtatcagcagaaacccggcaaggtgcccaagctgctgatctactacacctccagactgcactccggcgtgccctctagattttctggctctggatctggcaccgacttcaccctgaccatcagttctctgcagcctgaggacgtggccacctactactgtgtgcagtacgcccagtttcctctgaccttcggctgtggcaccaaggtggaaatcaaaagcggtggcggaggccaagaggtgcagcttgttgaatctggcggaggattggtgcagcctggcggatctctgaagctgtcttgtgccgcctccggcttcaccttcaacaaatacgccatgaattgggttcgacaagccccaggcaaaggcatggaatgggtcgcccggatcagatccaagtacaacaactacgctacctactacgccgacgccgtgaaggacagattcaccatctctcgggacgactccaagaacaccctgtacctgcagatgaacaacctgaaaaccgaggataccgccgtctattactgtgtcagagccggcaacttcggctcctcctacatctcctactttgcctactggggacagggaaccctcgtgactgtttctagcggtggtggcggacaaggtggcggtggacaaggcggcggaggccaacaaacagtggtcacacaagagcccagcctgacagtgtctcctggcggaacagtgaccatcacatgtggatcttctaccggcgctgtgacctccggcaactaccccaattggatccagaagaagcccggccaggctcctagaggactgatcggcggaacaaagtttctggcccctggcacaccagccagattctcaggatctctggaaggcggcaaggccgctctgacattgtctggcgttcagccagaggatgaggccgagtactattgcgtgctgtactactccaacagatgggtgttcggctccggcacaaagctgacagttctcggaggtggcggatgccctccttgtcctgctcctgaattgctcggcggaccctccgtgttcctgtttcctccaaagcctaaggacaccctgatgatctctcggacccctgaagtgacctgcgtggtggtggatgtgtcccacgaggaaccagaagtgaagttcaattggtacgtggacggcgtggaagtgcacaacgctaagaccaagccttgcgaggaacagtacggcagcacctacagatgtgtgtccgtgctgaccgtgctgcaccaggactggctgaatggcaaagagtacaagtgcaaggtgtccaacaaggcactgcccgctcctatcgaaaagaccatctccaaggctaagggccagcctcgggaacctcaggtttacaccctgcctccatctcgggaagagatgaccaagaaccaggtgtccctgacctgcctggtcaagggcttctacccttccgatatcgccgtggaatgggagtccaatggccagcctgagaacaactacaagaccacacctcctgtgctggactccgacggctcattcttcctgtactccaagctgactgtggacaagtctcggtggcagcagggcaacgtgttctcctgttctgtgatgcacgaggccctgcacaaccactacacccagaagtccctgtctctgagccctggcaaaggtggtggcggtcaaggcggtggtggccaaggcggcggaggacaaggtggcggaggccaaggtggtggcggacaaggcggaggtggtcaatgtcctccttgtccagcaccagaactcctcggaggcccttctgtgtttctgttcccacctaagccaaaggatacactcatgatcagcaggactcccgaagtgacatgtgtcgtcgtggacgtttcccatgaagaacccgaagtcaagtttaattggtatgtcgatggcgtcgaggtccacaatgccaagacaaagccctgtgaagaacaatacgggtccacctatagatgcgtcagcgtcctgacagtcctgcatcaggattggctcaacgggaaagaatacaaatgtaaagtctctaacaaggctctcccagcaccaatcgagaaaaccattagcaaggccaaaggacagccccgcgagccacaagtgtataccctgccacctagccgcgaggaaatgacaaagaatcaagtctctctgacctgtctcgtgaaggggttttaccccagcgacattgccgtcgagtgggagtctaacggacaacccgaaaacaattataagacaaccccacctgtcctggacagcgacggctcattttttctctactctaaactcaccgtggataagtccagatggcaacagggaaatgtgttcagctgcagcgtgatgcatgaagctctccacaatcattatacccagaaaagcctgagcttgtctcccggcaaaggtggcggaggacaggttcagttgcaagagtctggacctggcctcgtgaagccttctgagacactgagcctgacctgtaccgtgtctggcggctccatctcctccagctcttacttctggggctggatcagacagcctccaggcaagtgcctcgagtggatcggcaacatctactactccggctccagcaactacaatcctagcctgaagtcccgcgtgacaatctctgtggatacctctaagaaccagtttagcctcaagctgtccagcgtgaccgccgctgataccgctgtgtattattgcgctagactgcccagaggcgaccgggatgctttcgatatttggggacaaggcacaatggtcaccgtttctagcggaggcggtggccaaggtggcggaggccaaggcggcggtggtcaagatattgtgatgacacagagcccctctagcctgagcgcttccgtgggagatcgcgtgaccattacctgtagagccagccagggcatcagcaattacctggcctggtatcaacaaaagcctgggaaagtccctaagctcctcatctacgccgcttccacactgcagagcggcgtgccaagcagattcagtggatccggcagcggaaccgactttactctgactatctccagcctgcagccagaagatttcgctacctattactgccagcagtcctacagcacccctttcacctttggctgcggaactaaggtcgagatcaagagcggaggtggtggacaagaggtccagttggtcgagtcaggtggcggcttggtccaaccaggtggaagcctgaaactgagctgcgccgcttctgggtttacttttaacaaatatgctatgaactgggttcgccaggcacctggaaaaggcatggaatgggttgccagaatccgcagcaagtataacaattatgccacctattatgccgatgctgtcaaggatcggttcaccatcagcagggacgatagcaagaataccctctatctccaaatgaacaatctcaagacagaggacacagcagtgtactattgtgttcgcgctggcaactttggcagcagctacatcagctacttcgcttactggggccaagggacacttgtgaccgttagcagcggaggcggaggacaaggtggcggaggacaaggcggaggtggacagcagacagttgtgacccaagagccttctctgactgtgtcaccaggcggcaccgtgacaattacatgcggaagttccacaggcgccgtgaccagcggcaattatcctaactggattcagaaaaaacctggacaggccccaagaggcctgattggaggcaccaaatttctcgctcccggcactcctgctcggttctctggtagtcttgaaggcggaaaagctgccctgactctctctggcgtgcaacccgaagatgaagctgaatattactgcgtcctctactatagcaatcgctgggttttcggaagcggcaccaagctcactgtcctctga

SEQ ID NO: 1071 - DNA, 4425 bp, Artificial Sequence
  Synthetic
caggtgcagctggttcagtctggcgccgaagtgaagaaacctggcgcctctgtgaaggtgtcctgcaaggcttctggctacacctttaccaactactggatgaactgggtccgacaggcccctggccagtgtttggagtggatgggcaatatcgcttacggcgtggccggcaccaactacaaccagaaattccagggcagagtgacaatgaccgtggacacctcctcctccaccgcctacatggaactgtcccggctgagatctgacgacaccgccgtgtactactgcgccaccagatacttctacgtgatggactactggggccagggcaccctggttacagtttcttctggcggcggaggacaaggcggaggtggtcaaggtggtggcggacaggatatccagatgacccagtctccttccagcctgtctgcctctgtgggcgacagagtgaccatcacctgtagagccagccaggacatctccaactacctgaactggtatcagcagaaacccggcaaggtgcccaagctgctgatctactacacctctcggctgcactctggcgtgccctctagattttctggctccggctctggcaccgactttaccctgacaatctccagcctgcagcctgaggatgtggccacctactactgtgtgcagtacgcccagtttcctctgaccttcggctgtggcaccaaggtggaaatcaagtctggaggcggaggccaagaggtgcagctggtggagtccggcggcggcctggtgcagcccggcggctccctgaagctgtcctgcgccgcctccggcttcaccttcaacaagtacgccatgaactgggtgaggcaggcccccggcaagggcatggagtgggtggccaggatcaggtccaagtacaacaactacgccacctactacgccgacgccgtgaaggacaggttcaccatctccagggacgactccaagaacaccctgtacctgcagatgaacaacctgaagaccgaggacaccgccgtgtactactgcgtgagggccggcaacttcggctcctcctacatctcctacttcgcctactggggccagggcaccctggtgaccgtgtcctccggcggcggcggccaaggcggcggcggccaaggcggcggcggccaacagaccgtggtgacccaggagccctccctgaccgtgtcccccggcggcaccgtgaccatcacctgcggctcctccaccggcgccgtgacctccggcaactaccccaactggatccagaagaagcccggccaggcccccaggggcctgatcggcggcaccaagttcctggcccccggcacccccgccaggttctccggctccctggagggcggcaaggccgccctgaccctgtccggcgtgcagcccgaggacgaggccgagtactactgcgtgctgtactactccaacaggtgggtgttcggctccggcaccaagctgaccgtcctaggcggaggcggctgccctccttgtcctgctcctgaattgctcggcggaccctccgtgttcctgtttcctccaaagcctaaggacaccctgatgatctctcgtacgcctgaagtgacctgcgtggtggtggatgtgtcccacgaggaacccgaagtgaagttcaattggtacgtggacggcgtggaagtgcacaacgccaagacaaagccctgcgaggaacagtacggctccacctacagatgcgtgtccgtgctgacagtgctgcaccaggattggctgaacggcaaagagtacaagtgcaaggtgtccaacaaggccctgcctgctcctatcgaaaagaccatctccaaggccaagggccagcctagagagccccaggtttacaccctgcctccaagcagagaagagatgaccaagaaccaggtgtccctgacctgcctggtcaagggcttctacccttccgatatcgccgtggaatgggagagcaatggacagcccgagaacaactacaagaccacacctcctgtgctggactccgacggctcattcttcctgtactccaagctgaccgtggacaagtccagatggcagcagggcaacgtgttctcctgctccgtgatgcacgaggccctgcacaatcactacacccagaagtccctgtctctgtcccctggaaaaggaggcggaggacaaggcggaggtggtcaaggtggtggtggccaaggcggaggcggacaaggcggcggaggacaaggtggcggtggacagtgtcctccatgtccagcacctgagcttctcggaggcccttctgtgtttctgttcccacctaagccaaaggatacactcatgatcagccgcacacctgaagtcacatgtgtcgtcgtggatgtctctcatgaagaaccagaagtcaagtttaattggtatgtcgatggcgtcgaggtccacaatgctaagaccaagccttgtgaagaacaatatggcagcacctatcgctgtgtgtctgtcctgaccgtcctgcatcaagactggctcaatgggaaagaatacaaatgcaaagtctctaacaaagctctgcccgcaccaatcgagaaaaccatcagcaaggctaaaggacagcctcgcgagcctcaagtgtataccctgccaccttctcgcgaggaaatgacaaaaaatcaagtctccctcacctgtctcgtgaagggattctatcccagcgacattgccgtcgagtgggagtctaatggccagcctgaaaacaattataagacaaccccacctgtcctggacagcgacggctcattttttctctactctaaactcaccgtggataagagccggtggcaacagggaaatgtgttcagctgtagcgtgatgcatgaagctctccacaaccattatacacagaagagtctgagcctgtctcctggcaaaggcggcggaggacaggtgcaactccaggaatccgggccagggttggtgaaacccagcgagacactgtctctgacttgcactgtttctggtggctccatttcctctagctcttacttctggggttggatacggcaaccacctgggaagtgtctcgaatggattggtaacatctactatagtggatcctccaactacaatcccagcctgaagagtcgtgtgactatcagcgttgacacctcaaagaatcagttctcccttaagctgagttccgtgacagcagcagatacagccgtctactactgtgctcgacttcctaggggagatcgggatgccttcgacatttggggtcagggtacgatggtaacagtgtctagtggaggcggaggtcaaggcggcggaggccaaggaggaggcggacaagatatcgtgatgacccagagcccatcaagcctgagtgctagcgttggggacagggtcactatcacttgcagagcctcacaggggatttccaactatctggcctggtatcagcagaaacctggcaaggtccccaaactcctgatatatgctgcaagcacgctgcaaagcggggtaccctctcgcttttctgggtctggctctggcacagactttaccctgaccatctccagtttgcagcctgaggactttgccacctactattgccagcagtcctactcaacacccttcacctttggctgtggcaccaaggtggagatcaaatccggaggcggaggacaagaagtccagctggttgaaagtggtggcggattggttcagccaggcggctctctgaagctgtcttgtgctgcctccggcttcaccttcaacaaatacgccatgaattgggttcgacaagccccaggcaaaggcatggaatgggtcgcccggatcagatccaagtacaacaactacgctacctactacgccgacgccgtgaaggaccggttcaccatctccagagatgactccaagaacaccctgtacctgcagatgaacaacctcaagaccgaggataccgccgtctattactgtgtcagagccggcaacttcggctcctcctacatctcctacttcgcctactggggccagggaacccttgtgacagtctctagtggcggtggtggtcaaggtggtggcggccaaggcggtggcggacaacaaacagtggtcacccaagagcctagcctgaccgtttctcctggcggcaccgtgaccatcacatgcggatcttctaccggcgctgtgacctccggcaactaccccaattggatccagaagaagccaggccaggctcctagaggactgatcggcggcacaaagtttctggctcccggcactcccgccagattttctggatctctggaaggcggcaaggctgctctgacattgtctggcgtccagccagaggatgaggccgagtactattgcgtgctgtactactccaacagatgggtgttcggctccggcaccaagctgacagtcctatga

SEQ ID NO: 1072 - DNA, 4551 bp, Artificial Sequence
  Synthetic
caggtgcagctggtggaatctggtggcggagttgtgcagcctggcagatccctgagactgtcttgtgccgcctccggcttcaccttctcctcttatggaatgggctgggtccgacaggcccctggcaaatgtttggaatgggtcgccgtgatctcctacgaggcctccaacaagtactacgccgaggccgtgaagggcagattcaccatctccagagacaactccaagaacaccctgtacctgcagatgaactccctgagagccgaggacaccgccgtgtactactgtgctagagagggcgcccatttcggctccggctcttactaccctctgtactactactacgctatggacgtgtggggccagggcaccacagtgacagtttctagcggaggcggaggaagtggcggcggaggatctggcggtggtggttctgaaatcgtgctgacccagtctcctggcacactgtctttgagccctggcgagagagctaccctgagctgtagagcctctcagtccgtgtcctcctcttacctggcctggtatcagcagaagcccggccaggctcctagactgttgatctacggcgcctccatcagagccacaggcatccctgatagattctccggcagcggctctggcaccgacttcaccctgacaatctctcggctggaacccgaggactttgctgtgtactattgccagcagtacggcagctcccctatcttcacctttggctgcggcaccaaggtggaaatcaagtccgggggcggaggctccgaggtgcagctggtggagtccggcggcggcctggtgcagcccggcggctccctgaagctgtcctgcgccgcctccggcttcaccttcaacaagtacgccatgaactgggtgaggcaggcccccggcaagggcatggagtgggtggccaggatcaggtccaagtacaacaactacgccacctactacgccgacgccgtgaaggacaggttcaccatctccagggacgactccaagaacaccctgtacctgcagatgaacaacctgaagaccgaggacaccgccgtgtactactgcgtgagggccggcaacttcggctcctcctacatctcctacttcgcctactggggccagggcaccctggtgaccgtgtcctccggcggcggcggctccggcggcggcggctccggcggcggcggctcccagaccgtggtgacccaggagccctccctgaccgtgtcccccggcggcaccgtgaccatcacctgcggctcctccaccggcgccgtgacctccggcaactaccccaactggatccagaagaagcccggccaggcccccaggggcctgatcggcggcaccaagttcctggcccccggcacccccgccaggttctccggctccctggagggcggcaaggccgccctgaccctgtccggcgtgcagcccgaggacgaggccgagtactactgcgtgctgtactactccaacaggtgggtgttcggctccggcaccaagctgaccgtgctaggcggcggaggatctggcggaggtggaagcggaggcggtggatctgacaagacccacacatgtcctccatgtcccgcccctgaactgctaggcggacctagcgtgttcctgttccccccaaagcccaaggacaccctgatgatcagccgtacgcccgaagtgacctgcgtggtggtggatgtgtcccacgaggaccctgaagtgaagttcaattggtacgtggacggcgtggaagtgcacaacgccaagaccaagccctgcgaggaacagtacggcagcacctacagatgcgtgtccgtgctgaccgtgctgcatcaggactggctgaacggcaaagagtacaagtgcaaggtgtccaacaaggccctgcctgcccccatcgagaaaaccatcagcaaggccaagggccagccccgcgagcctcaagtgtataccctgccccctagccgggaagagatgaccaagaaccaggtgtccctgacctgtctcgtgaagggcttctacccctccgatatcgccgtggaatgggagagcaacggccagcccgagaacaactacaagaccaccccccctgtgctggacagcgacggctcattcttcctgtactccaaactgaccgtggacaagagccggtggcagcagggcaacgtgttcagctgcagcgtgatgcacgaggccctgcacaaccactacacccagaagtccctgtccctgtctcccgggaaaggcggcggaggatctggcggaggcggatctgggggcggaggaagtgggggagggggaagcggagggggaggctcaggggggggaggatccgataagacccacacctgtcccccttgccctgcccctgaactgctgggaggccctagcgtgttcctgttccccccaaagcccaaggacaccctgatgatcagccggacccccgaagtgacctgcgtggtggtggatgtgtcccacgaggaccctgaagtgaagttcaattggtacgtggacggcgtggaagtgcacaacgccaagaccaagccctgcgaggaacagtacggcagcacctacagatgcgtgtccgtgctgaccgtgctgcaccaggactggctgaacggcaaagagtacaagtgcaaggtgtccaacaaggccctgcctgcccccatcgagaaaaccatcagcaaggccaagggccagccccgcgagcctcaagtgtataccctgccccccagccgggaagagatgaccaagaaccaggtgtccctgacctgtctcgtgaagggcttctacccctccgatatcgccgtggaatgggagagcaacggccagcccgagaacaactacaagaccaccccccctgtgctggacagcgacggctcattcttcctgtactccaagctgacagtggacaagtctagatggcagcagggcaacgtgttcagctgcagcgtgatgcacgaggccctgcacaaccactacacccagaagtccctgtccctgagccccggcaaaggtggaggcggatctggcggtggcgggagtggaggaggaggcagccaggtgcagctgatggaatctggtggcggagttgtgcagcctggcagatccctgagactgtcttgtgccgcctccggcttcaccttcagccggtactatatgcactgggtccgacaggcccctggcaagtgtcctgaatgggttgccgtgatctggcacgacggctccaacaagtactacgccgactccgtgaagggcagattcaccatctctcgggacaactccaagaacaccctgtacctgcagatgaactccctgagagccgaggacaccgccgtgtactactgtgctagagaggccccttctctggcctattggggacagggaacactggtcacagtgtcctctggcggcggaggatctggcggaggtggtagcggaggcggtggatctgagatcgtgatgacccagtctcctggcacactgtctctgagccctggcgagagagctaccctgtcttgtagagcctctcagtccgtgtcctcctcctacctggcttggtatcagcagaagccaggccaggctcctcggctgttgatctacggcgcttcctctagagccacaggcatccctgacagattctccggctctggctctggcaccgacttcaccctgaccatctccagactggaacccgaggactttgctgtgtactattgccagcagtacggctcctccatcaccttcggctgtggcaccaggctggaaatcaagtctggaggcggaggatctgaagtccagctggttgaaagtggtggcggattggttcagccaggcggctctctgaagctgtcttgtgctgcctccggcttcaccttcaacaaatacgccatgaattgggttcgacaagccccaggcaaaggcatggaatgggtcgcccggatcagatccaagtacaacaactacgctacctactacgccgacgccgtgaaggaccggttcaccatctccagagatgactccaagaacaccctgtacctgcagatgaacaacctcaagaccgaggataccgccgtctattactgtgtcagagccggcaacttcggctcctcctacatctcctacttcgcctactggggccagggaacccttgtgacagtctctagtggcggtggtggtagtggtggtggcggctcaggcggtggcggatctcaaacagtggtcacccaagagcctagcctgaccgtttctcctggcggcaccgtgaccatcacatgcggatcttctaccggcgctgtgacctccggcaactaccccaattggatccagaagaagccaggccaggctcctagaggactgatcggcggcacaaagtttctggctcccggcactcccgccagattttctggatctctggaaggcggcaaggctgctctgacattgtctggcgtccagccagaggatgaggccgagtactattgcgtgctgtactactccaacagatgggtgttcggctccggcaccaagctgacagtcctatga

SEQ ID NO: 1073 - protein, 1516 aa, Artificial Sequence
  Synthetic
QVQLVESGGGVVQPGRSLRLSCAASGFTFSSYGMGWVRQAPGKCLEWVAVISYEASNKYYAEAVKGRFTISRDNSKNTLYLQMNSLRAEDTAVYYCAREGAHFGSGSYYPLYYYYAMDVWGQGTTVTVSSGGGGSGGGGSGGGGSEIVLTQSPGTLSLSPGERATLSCRASQSVSSSYLAWYQQKPGQAPRLLIYGASIRATGIPDRFSGSGSGTDFTLTISRLEPEDFAVYYCQQYGSSPIFTFGCGTKVEIKSGGGGSEVQLVESGGGLVQPGGSLKLSCAASGFTFNKYAMNWVRQAPGKGMEWVARIRSKYNNYATYYADAVKDRFTISRDDSKNTLYLQMNNLKTEDTAVYYCVRAGNFGSSYISYFAYWGQGTLVTVSSGGGGSGGGGSGGGGSQTVVTQEPSLTVSPGGTVTITCGSSTGAVTSGNYPNWIQKKPGQAPRGLIGGTKFLAPGTPARFSGSLEGGKAALTLSGVQPEDEAEYYCVLYYSNRWVFGSGTKLTVLGGGGSGGGGSGGGGSDKTHTCPPCPAPELLGGPSVFLFPPKPKDTLMISRTPEVTCVVVDVSHEDPEVKFNWYVDGVEVHNAKTKPCEEQYGSTYRCVSVLTVLHQDWLNGKEYKCKVSNKALPAPIEKTISKAKGQPREPQVYTLPPSREEMTKNQVSLTCLVKGFYPSDIAVEWESNGQPENNYKTTPPVLDSDGSFFLYSKLTVDKSRWQQGNVFSCSVMHEALHNHYTQKSLSLSPGKGGGGSGGGGSGGGGSGGGGSGGGGSGGGGSDKTHTCPPCPAPELLGGPSVFLFPPKPKDTLMISRTPEVTCVVVDVSHEDPEVKFNWYVDGVEVHNAKTKPCEEQYGSTYRCVSVLTVLHQDWLNGKEYKCKVSNKALPAPIEKTISKAKGQPREPQVYTLPPSREEMTKNQVSLTCLVKGFYPSDIAVEWESNGQPENNYKTTPPVLDSDGSFFLYSKLTVDKSRWQQGNVFSCSVMHEALHNHYTQKSLSLSPGKGGGGSGGGGSGGGGSQVQLMESGGGVVQPGRSLRLSCAASGFTFSRYYMHWVRQAPGKCPEWVAVIWHDGSNKYYADSVKGRFTISRDNSKNTLYLQMNSLRAEDTAVYYCAREAPSLAYWGQGTLVTVSSGGGGSGGGGSGGGGSEIVMTQSPGTLSLSPGERATLSCRASQSVSSSYLAWYQQKPGQAPRLLIYGASSRATGIPDRFSGSGSGTDFTLTISRLEPEDFAVYYCQQYGSSITFGCGTRLEIKSGGGGSEVQLVESGGGLVQPGGSLKLSCAASGFTFNKYAMNWVRQAPGKGMEWVARIRSKYNNYATYYADAVKDRFTISRDDSKNTLYLQMNNLKTEDTAVYYCVRAGNFGSSYISYFAYWGQGTLVTVSSGGGGSGGGGSGGGGSQTVVTQEPSLTVSPGGTVTITCGSSTGAVTSGNYPNWIQKKPGQAPRGLIGGTKFLAPGTPARFSGSLEGGKAALTLSGVQPEDEAEYYCVLYYSNRWVFGSGTKLTVL

SEQ ID NO: 1074 - DNA, 4536 bp, Artificial Sequence
  Synthetic
caggtgcagctggttcagtctggcgccgaagtgaagaaacctggcgcctctgtgaaggtgtcctgcaaggcttctggctacacctttaccgactactacatgcactgggtccgacaggcccctggccagtgtttggaatggatgggctggatcaaccccaactctggcggccctaattacgcccagaaattccagggcagagtgaccatgaccagagacacctccatctccaccgctcacatggaactgtcccggctgagatctgacgacaccgccgtgtactactgcgccagagaaaagcacgctgtggccggcatcggcttcgattattggggacagggcaccctggtcaccgtttctagcggaggcggaggatctggtggtggtggatctggcggcggaggctctgatatccagatgacccagtctccttcctccgtgtctgcctctgtgggcgacagagtgacaatcacctgtcaggccagccaggacatctccaactacctgaactggtatcagcagaagcccggcaaggcccctaagctgctgatctacgctgcctcctctctggaatctggcgtgccctccagattctccggctctggctctggcacagactttaccctgacaatctccagcctgcagcctgaggacttcgccacctactactgtcagcaggccaacagcttccctctgacctttggctgtggcaccaaggtggacatcaagtctggtggcggcggttccgaagtccagctggttgaaagtggtggcggattggttcagccaggcggctctctgaagctgtcttgtgctgcctccggcttcaccttcaacaaatacgccatgaattgggttcgacaagccccaggcaaaggcatggaatgggtcgcccggatcagatccaagtacaacaactacgctacctactacgccgacgccgtgaaggaccggttcaccatctccagagatgactccaagaacaccctgtacctgcagatgaacaacctcaagaccgaggataccgccgtctattactgtgtcagagccggcaacttcggctcctcctacatctcctacttcgcctactggggccagggaacccttgtgacagtctctagtggcggtggtggtagtggtggtggcggctcaggcggtggcggatctcaaacagtggtcacccaagagcctagcctgaccgtttctcctggcggcaccgtgaccatcacatgcggatcttctaccggcgctgtgacctccggcaactaccccaattggatccagaagaagccaggccaggctcctagaggactgatcggcggcacaaagtttctggctcccggcactcccgccagattttctggatctctggaaggcggcaaggctgctctgacattgtctggcgtccagccagaggatgaggccgagtactattgcgtgctgtactactccaacagatgggtgttcggctccggcaccaagctgacagtcctaggcggcggaggatctggcggaggtggaagcggaggcggtggatctgacaagacccacacatgtcctccatgtcccgcccctgaactgctaggcggacctagcgtgttcctgttccccccaaagcccaaggacaccctgatgatcagccgtacgcccgaagtgacctgcgtggtggtggatgtgtcccacgaggaccctgaagtgaagttcaattggtacgtggacggcgtggaagtgcacaacgccaagaccaagccctgcgaggaacagtacggcagcacctacagatgcgtgtccgtgctgaccgtgctgcatcaggactggctgaacggcaaagagtacaagtgcaaggtgtccaacaaggccctgcctgcccccatcgagaaaaccatcagcaaggccaagggccagccccgcgagcctcaagtgtataccctgccccctagccgggaagagatgaccaagaaccaggtgtccctgacctgtctcgtgaagggcttctacccctccgatatcgccgtggaatgggagagcaacggccagcccgagaacaactacaagaccaccccccctgtgctggacagcgacggctcattcttcctgtactccaaactgaccgtggacaagagccggtggcagcagggcaacgtgttcagctgcagcgtgatgcacgaggccctgcacaaccactacacccagaagtccctgtccctgtctcccgggaaaggcggcggaggatctggcggaggcggatctgggggcggaggaagtgggggagggggaagcggagggggaggctcaggggggggaggatccgataagacccacacctgtcccccttgccctgcccctgaactgctgggaggccctagcgtgttcctgttccccccaaagcccaaggacaccctgatgatcagccggacccccgaagtgacctgcgtggtggtggatgtgtcccacgaggaccctgaagtgaagttcaattggtacgtggacggcgtggaagtgcacaacgccaagaccaagccctgcgaggaacagtacggcagcacctacagatgcgtgtccgtgctgaccgtgctgcaccaggactggctgaacggcaaagagtacaagtgcaaggtgtccaacaaggccctgcctgcccccatcgagaaaaccatcagcaaggccaagggccagccccgcgagcctcaagtgtataccctgccccccagccgggaagagatgaccaagaaccaggtgtccctgacctgtctcgtgaagggcttctacccctccgatatcgccgtggaatgggagagcaacggccagcccgagaacaactacaagaccaccccccctgtgctggacagcgacggctcattcttcctgtactccaagctgacagtggacaagtctagatggcagcagggcaacgtgttcagctgcagcgtgatgcacgaggccctgcacaaccactacacccagaagtccctgtccctgagccccggcaaaggtggaggcggatctggcggtggcgggagtggaggaggaggcagccaggtgactctgaaagaatccggtcccactctcgtcaagcctaccgaaactctgaccctgacgtgtactgtcagtgggttttccttcaggaatgcacgaatgggtgtaagctggatacgccaaccacctggcaaatgcctggaatggctcgctcacatcttcagcaatgacgagaagtcctattctacctccctgaaatcccggttgaccatttccaaggatacgagcaagtctcaggttgtgctgaccatgaccaacatggatcccgtggatacagccacctacttctgtgctcgtgttcccgagtatagctctggctggtatcggtttgactactggggacagggcacattggtgacagtatcttcaggaggcggcgggtcaggtggcggaggatcaggcggtggtggttctgacattcagatgactcagagcccatcaagtctgagtgccagtgttggagatagagtgaccatcagttgcagagcctctcagtctatcaggagctaccttaactggtatcagcagaaacccggcaaagctcctaagctgctgatctacgcaactagcagccttcaaggaggggtgccatcccgctttagtgggtcaggatctggcactgactttaccctcacaatcagctccttgcaacctgaggactttgccacctactactgccagcagtcctattccacacccttcacattcgggtgtgggacaaaggtcgagattaagtccggaggcggaggatctgaagtgcagctggttgaatctggcggcggattggttcagcctggcggatctctgaagctgtcttgtgccgcctctggcttcaccttcaacaaatacgccatgaactgggtccgacaggcccctggcaaaggcatggaatgggtcgcccggatcagatccaagtacaacaactacgctacctactacgccgacgccgtgaaggaccggttcaccatctccagagatgactccaagaacaccctgtacctgcagatgaacaacctcaagaccgaggacaccgccgtgtactactgtgtcagagccggcaacttcggctcctcctacatctcctacttcgcctattggggccagggcaccctggtcacagttagttcaggtggcggtggatcaggcggcggaggttctggtggcggaggctctcaaacagtggtcacccaagagcctagcctgaccgtttctcctggcggcaccgtgaccatcacctgtggatcttctaccggcgctgtgacctccggcaactaccccaattggatccagaagaagcccggccaggctcctagaggactgatcggaggcaccaagtttctggctcccggcactcctgccagattctccggttctctggaaggcggaaaggccgctctgacattgtctggcgtgcagcctgaggatgaggctgagtactactgcgtgctgtactactccaacagatgggtgttcggctccggcaccaagctgacagtgctt

SEQ ID NO: 1075 - protein, 1506 aa, Artificial Sequence
  Synthetic
QVQLQESGPGLVKPSETLSLTCTVSGGSISSSSYFWGWIRQPPGKCLEWIGNIYYSGSSNYNPSLKSRVTISVDTSKNQFSLKLSSVTAADTAVYYCARLPRGDRDAFDIWGQGTMVTVSSGGGGSGGGGSGGGGSDIVMTQSPSSLSASVGDRVTITCRASQGISNYLAWYQQKPGKVPKLLIYAASTLQSGVPSRFSGSGSGTDFTLTISSLQPEDFATYYCQQSYSTPFTFGCGTKVEIKSGGGGSEVQLVESGGGLVQPGGSLKLSCAASGFTFNKYAMNWVRQAPGKGMEWVARIRSKYNNYATYYADAVKDRFTISRDDSKNTLYLQMNNLKTEDTAVYYCVRAGNFGTSYISYWAYWGQGTLVTVSSGGGGSGGGGSGGGGSQTVVTQEPSLTVSPGGTVTITCGSSTGAVTSGNYPNWVQKKPGQAPRGLIGGTKFLAPGTPARFSGSLSGGKAALTLSGVQPEDEAEYYCVLWYSNRWVFGSGTKLTVLGGGGSGGGGSGGGGSDKTHTCPPCPAPELLGGPSVFLFPPKPKDTLMISRTPEVTCVVVDVSHEDPEVKFNWYVDGVEVHNAKTKPCEEQYGSTYRCVSVLTVLHQDWLNGKEYKCKVSNKALPAPIEKTISKAKGQPREPQVYTLPPSREEMTKNQVSLTCLVKGFYPSDIAVEWESNGQPENNYKTTPPVLDSDGSFFLYSKLTVDKSRWQQGNVFSCSVMHEALHNHYTQKSLSLSPGKGGGGSGGGGSGGGGSGGGGSGGGGSGGGGSDKTHTCPPCPAPELLGGPSVFLFPPKPKDTLMISRTPEVTCVVVDVSHEDPEVKFNWYVDGVEVHNAKTKPCEEQYGSTYRCVSVLTVLHQDWLNGKEYKCKVSNKALPAPIEKTISKAKGQPREPQVYTLPPSREEMTKNQVSLTCLVKGFYPSDIAVEWESNGQPENNYKTTPPVLDSDGSFFLYSKLTVDKSRWQQGNVFSCSVMHEALHNHYTQKSLSLSPGKGGGGSGGGGSGGGGSQVQLVQSGAEVKKPGASVKVSCKASGYTFTNYWMNWVRQAPGQCLEWMGNIAYGVKGTNYNQKFQGRVTMTVDTSSSTAYMELSRLRSDDTAVYYCATRYFYVMDYWGQGTLVTVSSGGGGSGGGGSGGGGSDIQMTQSPSSLSASVGDRVTITCRASQDISNYLNWYQQKPGKVPKLLIYYTSRLHSGVPSRFSGSGSGTDFTLTISSLQPEDVATYYCVQYAQFPLTFGCGTKVEIKSGGGGSEVQLVESGGGLVQPGGSLKLSCAASGFTFNKYAMNWVRQAPGKGMEWVARIRSKYNNYATYYADAVKDRFTISRDDSKNTLYLQMNNLKTEDTAVYYCVRAGNFGTSYISYWAYWGQGTLVTVSSGGGGSGGGGSGGGGSQTVVTQEPSLTVSPGGTVTITCGSSTGAVTSGNYPNWVQKKPGQAPRGLIGGTKFLAPGTPARFSGSLSGGKAALTLSGVQPEDEAEYYCVLWYSNRWVFGSGTKLTVL

SEQ ID NO: 1076 - protein, 1506 aa, Artificial Sequence
  Synthetic
QVQLQESGPGLVKPSETLSLTCTVSGGSISSSSYFWGWIRQPPGKCLEWIGNIYYSGSSNYNPSLKSRVTISVDTSKNQFSLKLSSVTAADTAVYYCARLPRGDRDAFDIWGQGTMVTVSSGGGGSGGGGSGGGGSDIVMTQSPSSLSASVGDRVTITCRASQGISNYLAWYQQKPGKVPKLLIYAASTLQSGVPSRFSGSGSGTDFTLTISSLQPEDFATYYCQQSYSTPFTFGCGTKVEIKSGGGGSEVQLVESGGGLVQPGGSLKLSCAASGFTFNKYAMNWVRQAPGKGMEWVARIRSKYNNYATYYADAVKDRFTISRDDSKNTLYLQMNNLKTEDTAVYYCVRAGNFGSSYISYFAYWGQGTLVTVSSGGGGSGGGGSGGGGSQTVVTQEPSLTVSPGGTVTITCGSSTGAVTSGNYPNWIQKKPGQAPRGLIGGTKFLAPGTPARFSGSLEGGKAALTLSGVQPEDEAEYYCVLYYSNRWVFGSGTKLTVLGGGGSGGGGSGGGGSDKTHTCPPCPAPELLGGPSVFLFPPKPKDTLMISRTPEVTCVVVDVSHEDPEVKFNWYVDGVEVHNAKTKPCEEQYGSTYRCVSVLTVLHQDWLNGKEYKCKVSNKALPAPIEKTISKAKGQPREPQVYTLPPSREEMTKNQVSLTCLVKGFYPSDIAVEWESNGQPENNYKTTPPVLDSDGSFFLYSKLTVDKSRWQQGNVFSCSVMHEALHNHYTQKSLSLSPGKGGGGSGGGGSGGGGSGGGGSGGGGSGGGGSDKTHTCPPCPAPELLGGPSVFLFPPKPKDTLMISRTPEVTCVVVDVSHEDPEVKFNWYVDGVEVHNAKTKPCEEQYGSTYRCVSVLTVLHQDWLNGKEYKCKVSNKALPAPIEKTISKAKGQPREPQVYTLPPSREEMTKNQVSLTCLVKGFYPSDIAVEWESNGQPENNYKTTPPVLDSDGSFFLYSKLTVDKSRWQQGNVFSCSVMHEALHNHYTQKSLSLSPGKGGGGSGGGGSGGGGSQVQLVQSGAEVKKPGASVKVSCKASGYTFTNYWMNWVRQAPGQCLEWMGNIAYGVKGTNYNQKFQGRVTMTVDTSSSTAYMELSRLRSDDTAVYYCATRYFYVMDYWGQGTLVTVSSGGGGSGGGGSGGGGSDIQMTQSPSSLSASVGDRVTITCRASQDISNYLNWYQQKPGKVPKLLIYYTSRLHSGVPSRFSGSGSGTDFTLTISSLQPEDVATYYCVQYAQFPLTFGCGTKVEIKSGGGGSEVQLVESGGGLVQPGGSLKLSCAASGFTFNKYAINWVREAPGKGLEWVARIRSKYNNYATYYADAVKDRFTISRDDSKNTAYLQMNNLKTEDTAVYYCVRNANFGTSYISYFAYWGQGTLVTVSSGGGGSGGGGSGGGGSQTVVTQEPSLTVSPGGTVTLTCGSSTGAVTSGNYPNWVQKKPGQAPRGLIGGTKFLAPGTPARFSGSLLGGKAALTLSGVQPEDEAEYYCVLWYSNRWVFGSGTKLTVL

SEQ ID NO: 1077 - protein, 1506 aa, Artificial Sequence
  Synthetic
QVQLQESGPGLVKPSETLSLTCTVSGGSISSSSYFWGWIRQPPGKCLEWIGNIYYSGSSNYNPSLKSRVTISVDTSKNQFSLKLSSVTAADTAVYYCARLPRGDRDAFDIWGQGTMVTVSSGGGGSGGGGSGGGGSDIVMTQSPSSLSASVGDRVTITCRASQGISNYLAWYQQKPGKVPKLLIYAASTLQSGVPSRFSGSGSGTDFTLTISSLQPEDFATYYCQQSYSTPFTFGCGTKVEIKSGGGGSEVQLVESGGGLVQPGGSLKLSCAASGFTFNKYAMNWVRQAPGKGLEWVARIRSKYNNYATYYADSVKDRFTISRDDSKNTAYLQMNNLKTEDTAVYYCVRHGNFGNSYISYWAYWGQGTLVTVSSGGGGSGGGGSGGGGSQTVVTQEPSLTVSPGGTVTLTCGSSTGAVTSGNYPNWVQQKPGQAPRGLIGGTKFLAPGTPARFSGSLLGGKAALTLSGVQPEDEAEYYCVLWYSNRWVFGGGTKLTVLGGGGSGGGGSGGGGSDKTHTCPPCPAPELLGGPSVFLFPPKPKDTLMISRTPEVTCVVVDVSHEDPEVKFNWYVDGVEVHNAKTKPCEEQYGSTYRCVSVLTVLHQDWLNGKEYKCKVSNKALPAPIEKTISKAKGQPREPQVYTLPPSREEMTKNQVSLTCLVKGFYPSDIAVEWESNGQPENNYKTTPPVLDSDGSFFLYSKLTVDKSRWQQGNVFSCSVMHEALHNHYTQKSLSLSPGKGGGGSGGGGSGGGGSGGGGSGGGGSGGGGSDKTHTCPPCPAPELLGGPSVFLFPPKPKDTLMISRTPEVTCVVVDVSHEDPEVKFNWYVDGVEVHNAKTKPCEEQYGSTYRCVSVLTVLHQDWLNGKEYKCKVSNKALPAPIEKTISKAKGQPREPQVYTLPPSREEMTKNQVSLTCLVKGFYPSDIAVEWESNGQPENNYKTTPPVLDSDGSFFLYSKLTVDKSRWQQGNVFSCSVMHEALHNHYTQKSLSLSPGKGGGGSGGGGSGGGGSQVQLVQSGAEVKKPGASVKVSCKASGYTFTNYWMNWVRQAPGQCLEWMGNIAYGVKGTNYNQKFQGRVTMTVDTSSSTAYMELSRLRSDDTAVYYCATRYFYVMDYWGQGTLVTVSSGGGGSGGGGSGGGGSDIQMTQSPSSLSASVGDRVTITCRASQDISNYLNWYQQKPGKVPKLLIYYTSRLHSGVPSRFSGSGSGTDFTLTISSLQPEDVATYYCVQYAQFPLTFGCGTKVEIKSGGGGSEVQLVESGGGLVQPGGSLKLSCAASGFTFNKYAMNWVRQAPGKGLEWVARIRSKYNNYATYYADSVKDRFTISRDDSKNTAYLQMNNLKTEDTAVYYCVRHGNFGNSYISYWAYWGQGTLVTVSSGGGGSGGGGSGGGGSQTVVTQEPSLTVSPGGTVTLTCGSSTGAVTSGNYPNWVQQKPGQAPRGLIGGTKFLAPGTPARFSGSLLGGKAALTLSGVQPEDEAEYYCVLWYSNRWVFGGGTKLTVL

SEQ ID NO: 1078 - protein, 1506 aa, Artificial Sequence; identical to SEQ ID NO: 301
  Synthetic

SEQ ID NO: 1079 - protein, 1506 aa, Artificial Sequence; identical to SEQ ID NO: 286
  Synthetic

SEQ ID NO: 1080 - protein, 1506 aa, Artificial Sequence
  Synthetic
QVQLQESGPGLVKPSETLSLTCTVSGGSISSSSYFWGWIRQPPGKCLEWIGNIYYSGSSNYNPSLKSRVTISVDTSKNQFSLKLSSVTAADTAVYYCARLPRGDRDAFDIWGQGTMVTVSSGGGGSGGGGSGGGGSDIVMTQSPSSLSASVGDRVTITCRASQGISNYLAWYQQKPGKVPKLLIYAASTLQSGVPSRFSGSGSGTDFTLTISSLQPEDFATYYCQQSYSTPFTFGCGTKVEIKSGGGGSEVQLVESGGGLVQPGGSLKLSCAASGFTFNKYAINWVREAPGKGLEWVARIRSKYNNYATYYADAVKDRFTISRDDSKNTAYLQMNNLKTEDTAVYYCVRNANFGTSYISYFAYWGQGTLVTVSSGGGGSGGGGSGGGGSQTVVTQEPSLTVSPGGTVTLTCGSSTGAVTSGNYPNWVQKKPGQAPRGLIGGTKFLAPGTPARFSGSLLGGKAALTLSGVQPEDEAEYYCVLWYSNRWVFGSGTKLTVLGGGGSGGGGSGGGGSDKTHTCPPCPAPELLGGPSVFLFPPKPKDTLMISRTPEVTCVVVDVSHEDPEVKFNWYVDGVEVHNAKTKPCEEQYGSTYRCVSVLTVLHQDWLNGKEYKCKVSNKALPAPIEKTISKAKGQPREPQVYTLPPSREEMTKNQVSLTCLVKGFYPSDIAVEWESNGQPENNYKTTPPVLDSDGSFFLYSKLTVDKSRWQQGNVFSCSVMHEALHNHYTQKSLSLSPGKGGGGSGGGGSGGGGSGGGGSGGGGSGGGGSDKTHTCPPCPAPELLGGPSVFLFPPKPKDTLMISRTPEVTCVVVDVSHEDPEVKFNWYVDGVEVHNAKTKPCEEQYGSTYRCVSVLTVLHQDWLNGKEYKCKVSNKALPAPIEKTISKAKGQPREPQVYTLPPSREEMTKNQVSLTCLVKGFYPSDIAVEWESNGQPENNYKTTPPVLDSDGSFFLYSKLTVDKSRWQQGNVFSCSVMHEALHNHYTQKSLSLSPGKGGGGSGGGGSGGGGSQVQLVQSGAEVKKPGASVKVSCKASGYTFTNYWMNWVRQAPGQCLEWMGNIAYGVKGTNYNQKFQGRVTMTVDTSSSTAYMELSRLRSDDTAVYYCATRYFYVMDYWGQGTLVTVSSGGGGSGGGGSGGGGSDIQMTQSPSSLSASVGDRVTITCRASQDISNYLNWYQQKPGKVPKLLIYYTSRLHSGVPSRFSGSGSGTDFTLTISSLQPEDVATYYCVQYAQFPLTFGCGTKVEIKSGGGGSEVQLVESGGGLVQPGGSLKLSCAASGFTFNKYAMNWVRQAPGKGMEWVARIRSKYNNYATYYADAVKDRFTISRDDSKNTLYLQMNNLKTEDTAVYYCVRAGNFGSSYISYFAYWGQGTLVTVSSGGGGSGGGGSGGGGSQTVVTQEPSLTVSPGGTVTITCGSSTGAVTSGNYPNWIQKKPGQAPRGLIGGTKFLAPGTPARFSGSLEGGKAALTLSGVQPEDEAEYYCVLYYSNRWVFGSGTKLTVL

SEQ ID NO: 1081 - protein, 76 aa, Artificial Sequence [sequence omitted]

SEQ ID NO: 1082 - protein, 378 aa, Artificial Sequence
  Synthetic
AAAIGIDLGTTYSCVGVFQHGKVEIIANDQGNRTTPSYVAFTDTERLIGDAAKNQVALNPQNTVFDAKRLIGRKFGDPVVQSDMKHWPFQVINDGDKPKVQVSYKGETKAFYPEEISSMVLTKMKEIAEAYLGYPVTNAVITVPAYFNDSQRQATKDAGVIAGLNVLRIINEPTAAAIAYGLDRTGKGERNVLIFDLGGGTFDVSILTIDDGIFEVKATAGDTHLGGEDFDNRLVNHFVEEFKRKHKKDISQNKRAVRRLRTACERAKRTLSSSTQASLEIDSLFEGIDFYTSITRARFEELCSDLFRSTLEPVEKALRDAKLDKAQIHDLVLVGGSTRIPKVQKLLQDFFNGRDLNKSINPDEAVAYGAAVQAAILM

SEQ ID NO: 1083 - protein, 97 aa, Artificial Sequence
  Synthetic
MIQRTPKIQVYSRHPAENGKSNFLNCYVSGFHPSDIEVDLLKNGERIEKVEHSDLSFSKDWSFYLLYYTEFTPTEKDEYACRVNHVTLSQPKIVKWD

SEQ ID NO: 1084 - protein, 90 aa, Artificial Sequence
  Synthetic
DMEIAYPITCGESKAILLWKKFVCPGINVKCVKFNDQLISPKHFVHLAGKSTLKDWKRAIRLGGIMLRKMMDSGQIDFYQHDKVCSNTCR

SEQ ID NO: 1085 - protein, 238 aa, Artificial Sequence
  Synthetic
MSKGEELFTGVVPILVELDGDVNGHKFSVSGEGEGDATYGKLTLKFICTTGKLPVPWPTLVTTFTYGVQCFSRYPDHMKRHDFFKSAMPEGYVQERTIFFKDDGNYKTRAEVKFEGDTLVNRIELKGIDFKEDGNILGHKLEYNYNSHNVYIMADKQKNGIKVNFKIRHNIEDGSVQLADHYQQNTPIGDGPVLLPDNHYLSTQSALSKDPNEKRDHMVLLEFVTAAGITHGMDELYK

SEQ ID NO: 1086 - protein, 129 aa, Artificial Sequence
  Synthetic
QVQLQESGGGLVQAGDSLKLSCEASGDSIGTYVIGWFRQAPGKERIYLATIGRNLVGPSDFYTRYADSVKGRFAVSRDNAKNTVNLQMNSLKPEDTAVYYCAAKTTTWGGNDPNNWNYWGQGTQVTVSS

SEQ ID NO: 1087 - protein, 48 aa, Artificial Sequence
  Synthetic
GSAMGCRHFQSCSQCLSAPPFVQCGWCHDKCVRSEECLSGTWTQQICL

SEQ ID NO: 1088 - protein, 90 aa, Artificial Sequence
  Synthetic
RLDAPSQIEVKDVTDTTALITWFKPLAEIDGIELTYGIKDVPGDRTTIDLTEDENQYSIGNLKPDTEYEVSLISRRGDMSSNPAKETFTT

SEQ ID NO: 1089 - protein, 127 aa, Artificial Sequence [sequence omitted]

SEQ ID NO: 1090 - protein, 129 aa, Artificial Sequence [sequence omitted]

SEQ ID NO: 1091 - protein, 167 aa, Artificial Sequence
  Synthetic
DPAGLLDLRQGMFAQLVAQNVLLIDGPLSWYSDPGLAGVSLTGGLSYKEDTKELVVAKAGVYYVFFQMELRRVVAGEGSGSVSLALHLMPLRSAAGAAALALTVDLPPASSEARNSAFGFQGRLLHLSAGQRLGVHLHTEARARHAWQLTQGATVLGLFRVTPEIPA

SEQ ID NO: 1092 - protein, 133 aa, Artificial Sequence
  Synthetic
APTSSSTKKTQLQLEHLLLDLQMILNGINNYKNPKLTRMLTFKFYMPKKATELKHLQCLEEELKPLEEVLNLAQSKNFHLRPRDLISNINVIVLELKGSETTFMCEYADETATIVEFLNRWITFAQSIISTLT

SEQ ID NO: 1093 - protein, 126 aa, Artificial Sequence
  Synthetic
AFTVTVPKDLYVVEYGSNMTIECKFPVEKELDLAALIVYWEMEDKNIIQFVHGEEDLKVQHSSYRQRARLLKDQLSLGNAALQITDVKLQDAGVYRCMISYGGADYKRITVKVNAPYAAALEHHHH

SEQ ID NO: 1094 - protein, 107 aa, Artificial Sequence
  Synthetic
SEYRAEVGQNAYLPCFYTPAAPGNLVPVCWGKGACPVFECGNVVLRTDERDVNYWTSRYWLNGDFRKGDVSLTIENVTLADSGIYCCRIQIPGIMNDEKFNLKLVIK

SEQ ID NO: 1095 - protein, 115 aa, Artificial Sequence
  Synthetic
MEKSFVITDPRLPDNPIIFASDGFLELTEYSREEILGRNGRFLQGPETDQATVQKIRDAIRDQREITVQLINYTKSGKKFWNLLHLQPMRDQKGELQYFIGVQLDGEFIPNPLLG

SEQ ID NO: 1096 - protein, 46 aa, Artificial Sequence
  Synthetic
AEAAAKEAAAKEAAAKEAAAKALEAEAAAKEAAAKEAAAKEAAAKA

SEQ ID NO: 1097 - protein, 51 aa, Artificial Sequence
  Synthetic
PAPAPAPAPAPAPAPAPAPAPAPAPAPAPAPAPAPAPAPAPAPAPAPAPAP

SEQ ID NO: 1098 - protein, 113 aa, Artificial Sequence
  Synthetic
VTTLSGLSGEQGPSGDMTTEEDSATHIKFSKRDEDGRELAGATMELRDSSGKTISTWISDGHVKDFYLYPGKYTFVETAAPDGYEVATAITFTVNEQGQVTVNGEATKGDAHT

SEQ ID NO: 1099 - protein, 14 aa, Artificial Sequence
  Synthetic
VPTIVMVDAYKRYK

SEQ ID NO: 1100 - protein, 23 aa, Artificial Sequence
  Synthetic
DIPATYEFTDGKHYITNEPIPPK

SEQ ID NO: 1101 - protein, 12 aa, Artificial Sequence
  Synthetic
KLGSIEFIKVNK

SEQ ID NO: 1102 - protein, 740 aa, Artificial Sequence
  Synthetic
QVQLQESGPGLVKPSETLSLTCTVSGGSISSSSYFWGWIRQPPGKCLEWIGNIYYSGSSNYNPSLKSRVTISVDTSKNQFSLKLSSVTAADTAVYYCARLPRGDRDAFDIWGQGTMVTVSSGGGGSGGGGSGGGGSDIVMTQSPSSLSASVGDRVTITCRASQGISNYLAWYQQKPGKVPKLLIYAASTLQSGVPSRFSGSGSGTDFTLTISSLQPEDFATYYCQQSYSTPFTFGCGTKVEIKSGGGGSGGGGSGGGGSDKTHTCPPCPAPELLGGPSVFLFPPKPKDTLMISRTPEVTCVVVDVSHEDPEVKFNWYVDGVEVHNAKTKPCEEQYGSTYRCVSVLTVLHQDWLNGKEYKCKVSNKALPAPIEKTISKAKGQPREPQVYTLPPSREEMTKNQVSLTCLVKGFYPSDIAVEWESNGQPENNYDTTPPVLDSDGSFFLYSDLTVDKSRWQQGNVFSCSVMHEALHNHYTQDSLSLSPGKGGGGSGGGGSGGGGSQVQLVQSGAEVKKPGASVKVSCKASGYTFTNYWMNWVRQAPGQCLEWMGNIAYGVKGTNYNQKFQGRVTMTVDTSSSTAYMELSRLRSDDTAVYYCATRYFYVMDYWGQGTLVTVSSGGGGSGGGGSGGGGSDIQMTQSPSSLSASVGDRVTITCRASQDISNYLNWYQQKPGKVPKLLIYYTSRLHSGVPSRFSGSGSGTDFTLTISSLQPEDVATYYCVQYAQFPLTFGCGTKVEIK

SEQ ID NO: 1103 - protein, 755 aa, Artificial Sequence
  Synthetic
EVQLVESGGGLVQPGGSLKLSCAASGFTFNKYAMNWVRQAPGKGMEWVARIRSKYNNYATYYADAVKDRFTISRDDSKNTLYLQMNNLKTEDTAVYYCVRAGNFGSSYISYFAYWGQGTLVTVSSGGGGSGGGGSGGGGSQTVVTQEPSLTVSPGGTVTITCGSSTGAVTSGNYPNWIQKKPGQAPRGLIGGTKFLAPGTPARFSGSLEGGKAALTLSGVQPEDEAEYYCVLYYSNRWVFGSGTKLTVLGGGGSGGGGSGGGGSDKTHTCPPCPAPELLGGPSVFLFPPKPKDTLMISRTPEVTCVVVDVSHEDPEVKFNWYVDGVEVHNAKTKPCEEQYGSTYRCVSVLTVLHQDWLNGKEYKCKVSNKALPAPIEKTISKAKGQPREPQVYTLPPSRKEMTKNQVSLTCLVKGFYPSDIAVEWESNGQPENNYKTTPPVLKSDGSFFLYSKLTVDKSRWQQGNVFSCSVMHEALHNHYTQKSLSLSPGKGGGGSGGGGSGGGGSEVQLVESGGGLVQPGGSLKLSCAASGFTFNKYAMNWVRQAPGKGMEWVARIRSKYNNYATYYADAVKDRFTISRDDSKNTLYLQMNNLKTEDTAVYYCVRAGNFGSSYISYFAYWGQGTLVTVSSGGGGSGGGGSGGGGSQTVVTQEPSLTVSPGGTVTITCGSSTGAVTSGNYPNWIQKKPGQAPRGLIGGTKFLAPGTPARFSGSLEGGKAALTLSGVQPEDEAEYYCVLYYSNRWVFGSGTKLTVL

SEQ ID NO: 1104 - protein, 1960 aa, Artificial Sequence
  Synthetic
QVQLVQSGAEVKKPGASVKVSCKASGYTFTDYYMHWVRQAPGQGLEWMGWINPNSGGPNYAQKFQGRVTMTRDTSISTAHMELSRLRSDDTAVYYCAREKHAVAGIGFDYWGQGTLVTVSSASTKGPSVFPLAPSSKSTSGGTAALGCLVKDYFPEPVTVSWNSGALTSGVHTFPAVLQSSGLYSLSSVVTVPSSSLGTQTYICNVNHKPSNTKVDKKVEPKSCGGGGSGGGGSGGGGSGGGGSGGGGSGGGGSGGGGSGGGGSDIQMTQSPSSVSASVGDRVTITCQASQDISNYLNWYQQKPGKAPKLLIYAASSLESGVPSRFSGSGSGTDFTLTISSLQPEDFATYYCQQANSFPLTFGPGTKVDIKRTVAAPSVFIFPPSDEQLKSGTASVVCLLNNFYPREAKVQWKVDNALQSGNSQESVTEQDSKDSTYSLSSTLTLSKADYEKHKVYACEVTHQGLSSPVTKSFNRGECSGGGGSEVQLVESGGGLVQPGGSLKLSCAASGFTFNKYAMNWVRQAPGKCLEWVARIRSKYNNYATYYADSVKDRFTISRDDSKNTAYLQMNNLKTEDTAVYYCVRHGNFGNSYISYWAYWGQGTLVTVSSGGGGSGGGGSGGGGSQTVVTQEPSLTVSPGGTVTLTCGSSTGAVTSGNYPNWVQQKPGQAPRGLIGGTKFLAPGTPARFSGSLLGGKAALTLSGVQPEDEAEYYCVLWYSNRWVFGCGTKLTVLGGGGDKTHTCPPCPAPELLGGPSVFLFPPKPKDTLMISRTPEVTCVVVDVSHEDPEVKFNWYVDGVEVHNAKTKPCEEQYGSTYRCVSVLTVLHQDWLNGKEYKCKVSNKALPAPIEKTISKAKGQPREPQVYTLPPSREEMTKNQVSLTCLVKGFYPSDIAVEWESNGQPENNYKTTPPVLDSDGSFFLYSKLTVDKSRWQQGNVFSCSVMHEALHNHYTQKSLSLSPGKGGGGSGGGGSGGGGSGGGGSGGGGSGGGGSDKTHTCPPCPAPELLGGPSVFLFPPKPKDTLMISRTPEVTCVVVDVSHEDPEVKFNWYVDGVEVHNAKTKPCEEQYGSTYRCVSVLTVLHQDWLNGKEYKCKVSNKALPAPIEKTISKAKGQPREPQVYTLPPSREEMTKNQVSLTCLVKGFYPSDIAVEWESNGQPENNYKTTPPVLDSDGSFFLYSKLTVDKSRWQQGNVFSCSVMHEALHNHYTQKSLSLSPGKGGGGQVTLKESGPTLVKPTETLTLTCTVSGFSFRNARMGVSWIRQPPGKALEWLAHIFSNDEKSYSTSLKSRLTISKDTSKSQVVLTMTNMDPVDTATYFCARVPEYSSGWYRFDYWGQGTLVTVSSASTKGPSVFPLAPSSKSTSGGTAALGCLVKDYFPEPVTVSWNSGALTSGVHTFPAVLQSSGLYSLSSVVTVPSSSLGTQTYICNVNHKPSNTKVDKKVEPKSCGGGGSGGGGSGGGGSGGGGSGGGGSGGGGSGGGGSGGGGSDIQMTQSPSSLSASVGDRVTISCRASQSIRSYLNWYQQKPGKAPKLLIYATSSLQGGVPSRFSGSGSGTDFTLTISSLQPEDFATYYCQQSYSTPFTFGPGTKVEIKRTVAAPSVFIFPPSDEQLKSGTASVVCLLNNFYPREAKVQWKVDNALQSGNSQESVTEQDSKDSTYSLSSTLTLSKADYEKHKVYACEVTHQGLSSPVTKSFNRGECSGGGGSEVQLVESGGGLVQPGGSLKLSCAASGFTFNKYAMNWVRQAPGKCLEWVARIRSKYNNYATYYADSVKDRFTISRDDSKNTAYLQMNNLKTEDTAVYYCVRHGNFGNSYISYWAYWGQGTLVTVSSGGGGSGGGGSGGGGSQTVVTQEPSLTVSPGGTVTLTCGSSTGAVTSGNYPNWVQQKPGQAPRGLIGGTKFLAPGTPARFSGSLLGGKAALTLSGVQPEDEAEYYCVLWYSNRWVFGCGTKLTVL

SEQ ID NO: 1105 - protein, 5 aa, Artificial Sequence
  Synthetic
DYYMH

SEQ ID NO: 1106 - protein, 17 aa, Artificial Sequence
  Synthetic
WINPNSGGPNYAQKFQG

SEQ ID NO: 1107 - protein, 12 aa, Artificial Sequence
  Synthetic
EKHAVAGIGFDY

SEQ ID NO: 1108 - protein, 11 aa, Artificial Sequence
  Synthetic
QASQDISNYLN

SEQ ID NO: 1109 - protein, 7 aa, Artificial Sequence
  Synthetic
AASSLES

SEQ ID NO: 1110 - protein, 9 aa, Artificial Sequence
  Synthetic
QQANSFPLT

SEQ ID NO: 1111 - protein, 121 aa, Artificial Sequence
  Synthetic
QVQLVQSGAEVKKPGASVKVSCKASGYTFTDYYMHWVRQAPGQGLEWMGWINPNSGGPNYAQKFQGRVTMTRDTSISTAHMELSRLRSDDTAVYYCAREKHAVAGIGFDYWGQGTLVTVSS

SEQ ID NO: 1112 - protein, 107 aa, Artificial Sequence
  Synthetic
DIQMTQSPSSVSASVGDRVTITCQASQDISNYLNWYQQKPGKAPKLLIYAASSLESGVPSRFSGSGSGTDFTLTISSLQPEDFATYYCQQANSFPLTFGPGTKVDIK

SEQ ID NO: 1113 - protein, 103 aa, Artificial Sequence
  Synthetic
ASTKGPSVFPLAPSSKSTSGGTAALGCLVKDYFPEPVTVSWNSGALTSGVHTFPAVLQSSGLYSLSSVVTVPSSSLGTQTYICNVNHKPSNTKVDKKVEPKSC

SEQ ID NO: 1114 - protein, 107 aa, Artificial Sequence [sequence omitted]

SEQ ID NO: 1115 - protein, 7 aa, Artificial Sequence
  Synthetic
NARMGVS

SEQ ID NO: 1116 - protein, 16 aa, Artificial Sequence
  Synthetic
HIFSNDEKSYSTSLKS

SEQ ID NO: 1117 - protein, 13 aa, Artificial Sequence
  Synthetic
VPEYSSGWYRFDY

SEQ ID NO: 1118 - protein, 11 aa, Artificial Sequence
  Synthetic
RASQSIRSYLN

SEQ ID NO: 1119 - protein, 7 aa, Artificial Sequence
  Synthetic
ATSSLQG

SEQ ID NO: 1120 - protein, 9 aa, Artificial Sequence
  Synthetic
QQSYSTPFT

SEQ ID NO: 1121 - protein, 123 aa, Artificial Sequence
  Synthetic
QVTLKESGPTLVKPTETLTLTCTVSGFSFRNARMGVSWIRQPPGKALEWLAHIFSNDEKSYSTSLKSRLTISKDTSKSQVVLTMTNMDPVDTATYFCARVPEYSSGWYRFDYWGQGTLVTVSS

SEQ ID NO: 1122 - protein, 107 aa, Artificial Sequence
  Synthetic
DIQMTQSPSSLSASVGDRVTISCRASQSIRSYLNWYQQKPGKAPKLLIYATSSLQGGVPSRFSGSGSGTDFTLTISSLQPEDFATYYCQQSYSTPFTFGPGTKVEIK

SEQ ID NO: 1123 - protein, 103 aa, Artificial Sequence; identical to SEQ ID NO: 1113
  Synthetic

SEQ ID NO: 1124 - protein, 107 aa, Artificial Sequence [sequence omitted]

SEQ ID NO: 1125 - protein, 40 aa, Artificial Sequence
  Synthetic
GGGGSGGGGSGGGGSGGGGSGGGGSGGGGSGGGGSGGGGS

SEQ ID NO: 1126 - protein, 5 aa, Artificial Sequence
  Synthetic
DYAMH

SEQ ID NO: 1127 - protein, 17 aa, Artificial Sequence
  Synthetic
GISWNSGSIGYADSVKG

SEQ ID NO: 1128 - protein, 14 aa, Artificial Sequence
  Synthetic
DSRGYGDYRLGGAY

SEQ ID NO: 1129 - protein, 11 aa, Artificial Sequence
  Synthetic
RASQSVSSNLA

SEQ ID NO: 1130 - protein, 7 aa, Artificial Sequence
  Synthetic
GASTRAT

SEQ ID NO: 1131 - protein, 9 aa, Artificial Sequence
  Synthetic
QQYNNWPWT

SEQ ID NO: 1132 - protein, 123 aa, Artificial Sequence
  Synthetic
EVQLVESGGGLVQPGRSLRLSCAASGFTFDDYAMHWVRQAPGKGLEWVSGISWNSGSIGYADSVKGRFTISRDNAKNSLYLQMNSLRAEDTALYYCAKDSRGYGDYRLGGAYWGQGTLVTVSS

SEQ ID NO: 1133 - protein, 107 aa, Artificial Sequence
  Synthetic
EIVMTQSPATLSVSPGERATLSCRASQSVSSNLAWYQQKPGQAPRLLIYGASTRATGIPARFSGSGSGTEFTLTISSLQSEDFAVYYCQQYNNWPWTFGQGTKVEIK

SEQ ID NO: 1134 - protein, 103 aa, Artificial Sequence; identical to SEQ ID NO: 1113
  Synthetic

SEQ ID NO: 1135 - protein, 107 aa, Artificial Sequence [sequence omitted]

SEQ ID NO: 1136 - protein, 5 aa, Artificial Sequence
  Synthetic
TYAMN

SEQ ID NO: 1137 - protein, 19 aa, Artificial Sequence
  Synthetic
RIRSKYNNYATYYAASVKK

SEQ ID NO: 1138 - protein, 14 aa, Artificial Sequence
  Synthetic
HGNFGNSYVSWFAY

SEQ ID NO: 1139 - protein, 14 aa, Artificial Sequence
  Synthetic
RSSTGAVTTSNYAN

SEQ ID NO: 1140 - protein, 7 aa, Artificial Sequence
  Synthetic
GTNKRAP

SEQ ID NO: 1141 - protein, 9 aa, Artificial Sequence
  Synthetic
ALWYSNLWV

SEQ ID NO: 1142 - protein, 5 aa, Artificial Sequence
  Synthetic
TYAMN

SEQ ID NO: 1143 - protein, 19 aa, Artificial Sequence
  Synthetic
RIRSKYNNYATYYADSVKG

SEQ ID NO: 1144 - protein, 14 aa, Artificial Sequence
  Synthetic
HGNFGNSYVSWFAY

SEQ ID NO: 1145 - protein, 13 aa, Artificial Sequence
  Synthetic
GSSTGAVTSNYAN

SEQ ID NO: 1146 - protein, 7 aa, Artificial Sequence
  Synthetic
GTNKRAP

SEQ ID NO: 1147 - protein, 9 aa, Artificial Sequence
  Synthetic
ALWYSNLWV

SEQ ID NO: 1148 - protein, 5 aa, Artificial Sequence
  Synthetic
KYAIN

SEQ ID NO: 1149 - protein, 18 aa, Artificial Sequence
  Synthetic
RIRSKYNNYATYYAQVKD

SEQ ID NO: 1150 - protein, 14 aa, Artificial Sequence
  Synthetic
HANFGNSYISYWAY

SEQ ID NO: 1151 - protein, 14 aa, Artificial Sequence
  Synthetic
ASSTGAVTSGNYPN

SEQ ID NO: 1152 - protein, 7 aa, Artificial Sequence
  Synthetic
GTKFLVP

SEQ ID NO: 1153 - protein, 9 aa, Artificial Sequence
  Synthetic
TLWYSNRWV

SEQ ID NO: 1154 - protein, 5 aa, Artificial Sequence
  Synthetic
  misc_feature (1)..(5): Xaa can be any naturally occurring amino acid
XXXXX

SEQ ID NO: 1155 - protein, 17 aa, Artificial Sequence
  Synthetic
  misc_feature (1)..(1): Xaa can be any naturally occurring amino acid
  misc_feature (3)..(8): Xaa can be any naturally occurring amino acid
  misc_feature (10)..(10): Xaa can be any naturally occurring amino acid
  misc_feature (12)..(16): Xaa can be any naturally occurring amino acid
XIXXXXXXTXYXXXXXG

SEQ ID NO: 1156 - protein, 18 aa, Artificial Sequence
  Synthetic
  misc_feature (7)..(13): Xaa can be any naturally occurring amino acid
  misc_feature (15)..(15): Xaa can be any naturally occurring amino acid
  misc_feature (18)..(18): Xaa can be any naturally occurring amino acid
SRGVYDXXXXXXXYXMDX

SEQ ID NO: 1157 - protein, 126 aa, Artificial Sequence
  Synthetic
  misc_feature (1)..(1): Xaa can be any naturally occurring amino acid
  misc_feature (5)..(6): Xaa can be any naturally occurring amino acid
  misc_feature (9)..(13): Xaa can be any naturally occurring amino acid
  misc_feature (16)..(16): Xaa can be any naturally occurring amino acid
  misc_feature (18)..(20): Xaa can be any naturally occurring amino acid
  misc_feature (23)..(23): Xaa can be any naturally occurring amino acid
  misc_feature (27)..(28): Xaa can be any naturally occurring amino acid
  misc_feature (30)..(35): Xaa can be any naturally occurring amino acid
  misc_feature (40)..(40): Xaa can be any naturally occurring amino acid
  misc_feature (43)..(43): Xaa can be any naturally occurring amino acid
  misc_feature (48)..(50): Xaa can be any naturally occurring amino acid
  misc_feature (52)..(56): Xaa can be any naturally occurring amino acid
  misc_feature (58)..(58): Xaa can be any naturally occurring amino acid
  misc_feature (60)..(64): Xaa can be any naturally occurring amino acid
  misc_feature (67)..(67): Xaa can be any naturally occurring amino acid
  misc_feature (69)..(71): Xaa can be any naturally occurring amino acid
  misc_feature (73)..(73): Xaa can be any naturally occurring amino acid
  misc_feature (75)..(76): Xaa can be any naturally occurring amino acid
  misc_feature (78)..(78): Xaa can be any naturally occurring amino acid
  misc_feature (80)..(84): Xaa can be any naturally occurring amino acid
  misc_feature (86)..(88): Xaa can be any naturally occurring amino acid
  misc_feature (90)..(90): Xaa can be any naturally occurring amino acid
  misc_feature (97)..(98): Xaa can be any naturally occurring amino acid
  misc_feature (106)..(108): Xaa can be any naturally occurring amino acid
  misc_feature (111)..(113): Xaa can be any naturally occurring amino acid
  misc_feature (115)..(115): Xaa can be any naturally occurring amino acid
  misc_feature (121)..(121): Xaa can be any naturally occurring amino acid
XVQLXXSGXXXXXPGXSXXXSCXASGXXFXXXXXXWVRQXPGXCLEWXXXIXXXXXTXYXXXXXGRXTXXXDXSXXTXYXXXXXLXXXDXAVYYCAXXRGVYDFKXXXALXXXDXWGQGTXVTVSS

SEQ ID NO: 1158 - protein, 17 aa, Artificial Sequence
  Synthetic
  misc_feature (1)..(2): Xaa can be any naturally occurring amino acid
  misc_feature (4)..(6): Xaa can be any naturally occurring amino acid
  misc_feature (13)..(14): Xaa can be any naturally occurring amino acid
  misc_feature (16)..(17): Xaa can be any naturally occurring amino acid
XXSXXXLYSSNQXXYXX

SEQ ID NO: 1159 - protein, 7 aa, Artificial Sequence
  Synthetic
  misc_feature (1)..(7): Xaa can be any naturally occurring amino acid
XXXXXXX

SEQ ID NO: 1160 - protein, 9 aa, Artificial Sequence
  Synthetic
  misc_feature (1)..(6): Xaa can be any naturally occurring amino acid
  misc_feature (8)..(8): Xaa can be any naturally occurring amino acid
XXXXXXPXT

SEQ ID NO: 1161 - protein, 111 aa, Artificial Sequence
  Synthetic
  misc_feature (1)..(1): Xaa can be any naturally occurring amino acid
  misc_feature (3)..(4): Xaa can be any naturally occurring amino acid
  misc_feature (9)..(10): Xaa can be any naturally occurring amino acid
  misc_feature (12)..(13): Xaa can be any naturally occurring amino acid
  misc_feature (15)..(15): Xaa can be any naturally occurring amino acid
  misc_feature (17)..(17): Xaa can be any naturally occurring amino acid
  misc_feature (19)..(19): Xaa can be any naturally occurring amino acid
  misc_feature (21)..(22): Xaa can be any naturally occurring amino acid
  misc_feature (24)..(25): Xaa can be any naturally occurring amino acid
  misc_feature (27)..(29): Xaa can be any naturally occurring amino acid
  misc_feature (34)..(35): Xaa can be any naturally occurring amino acid
  misc_feature (37)..(38): Xaa can be any naturally occurring amino acid
  misc_feature (46)..(47): Xaa can be any naturally occurring amino acid
  misc_feature (49)..(49): Xaa can be any naturally occurring amino acid
  misc_feature (52)..(52): Xaa can be any naturally occurring amino acid
  misc_feature (54)..(60): Xaa can be any naturally occurring amino acid
  misc_feature (64)..(64): Xaa can be any naturally occurring amino acid
  misc_feature (74)..(74): Xaa can be any naturally occurring amino acid
  misc_feature (78)..(78): Xaa can be any naturally occurring amino acid
  misc_feature (81)..(81): Xaa can be any naturally occurring amino acid
  misc_feature (84)..(84): Xaa can be any naturally occurring amino acid
  misc_feature (87)..(89): Xaa can be any naturally occurring amino acid
  misc_feature (93)..(98): Xaa can be any naturally occurring amino acid
  misc_feature (100)..(100): Xaa can be any naturally occurring amino acid
  misc_feature (108)..(109): Xaa can be any naturally occurring amino acid
XIXXTQSPXXLXXSXGXRXTXXCXXSXXXLYNQXXYXXWYQQKPGXXPXLLXYXXXXXXXGVPXRFSGSGSGTXFTLXISXLQXEDXXXYYCXXXXXXPXTFGCGTKXXIK

SEQ ID NO: 1162 - protein, 7 aa, Artificial Sequence
  Synthetic
  misc_feature (3)..(3): Xaa can be any naturally occurring amino acid
  misc_feature (5)..(7): Xaa can be any naturally occurring amino acid
SSXYXXX

SEQ ID NO: 1163 - protein, 17 aa, Artificial Sequence
  Synthetic
  misc_feature (1)..(1): Xaa can be any naturally occurring amino acid
  misc_feature (3)..(10): Xaa can be any naturally occurring amino acid
  misc_feature (12)..(17): Xaa can be any naturally occurring amino acid
XIXXXXXXXXYXXXXXX

SEQ ID NO: 1164 - protein, 21 aa, Artificial Sequence
  Synthetic
  misc_feature (1)..(5): Xaa can be any naturally occurring amino acid
  misc_feature (7)..(8): Xaa can be any naturally occurring amino acid
  misc_feature (11)..(11): Xaa can be any naturally occurring amino acid
  misc_feature (13)..(19): Xaa can be any naturally occurring amino acid
  misc_feature (21)..(21): Xaa can be any naturally occurring amino acid
XXXXXGXXSYXPXXXXXXXDX

SEQ ID NO: 1165 - protein, 132 aa, Artificial Sequence
  Synthetic
  misc_feature (1)..(1): Xaa can be any naturally occurring amino acid
  misc_feature (5)..(6): Xaa can be any naturally occurring amino acid
  misc_feature (9)..(13): Xaa can be any naturally occurring amino acid
  misc_feature (15)..(21): Xaa can be any naturally occurring amino acid
  misc_feature (23)..(24): Xaa can be any naturally occurring amino acid
  misc_feature (29)..(33): Xaa can be any naturally occurring amino acid
  misc_feature (35)..(37): Xaa can be any naturally occurring amino acid
  misc_feature (39)..(39): Xaa can be any naturally occurring amino acid
  misc_feature (42)..(42): Xaa can be any naturally occurring amino acid
  misc_feature (45)..(46): Xaa can be any naturally occurring amino acid
  misc_feature (50)..(52): Xaa can be any naturally occurring amino acid
  misc_feature (54)..(61): Xaa can be any naturally occurring amino acid
  misc_feature (63)..(68): Xaa can be any naturally occurring amino acid
  misc_feature (70)..(70): Xaa can be any naturally occurring amino acid
  misc_feature (72)..(74): Xaa can be any naturally occurring amino acid
  misc_feature (76)..(91): Xaa can be any naturally occurring amino acid
  misc_feature (100)..(108): Xaa can be any naturally occurring amino acid
  misc_feature (113)..(113): Xaa can be any naturally occurring amino acid
  misc_feature (116)..(119): Xaa can be any naturally occurring amino acid
  misc_feature (121)..(121): Xaa can be any naturally occurring amino acid
  misc_feature (127)..(127): Xaa can be any naturally occurring amino acid
XVQLXXSGXXXXXPXXXXXXXCXXSGGSXXXXXYXXXWXRQXPGXXLEWXXXIXXXXXXXXYXXXXXXRXTXXXDXXXXXXXXXXXXXXXXDTAVYYCAXXXXXXXXXSYYPXYYXXXXDXWGQGTXVTVSS

SEQ ID NO: 1166 - protein, 12 aa, Artificial Sequence
  Synthetic
  misc_feature (2)..(12): Xaa can be any naturally occurring amino acid
RXXXXXXXXXXX

SEQ ID NO: 1167 - protein, 7 aa, Artificial Sequence
  Synthetic
  misc_feature (1)..(7): Xaa can be any naturally occurring amino acid
XXXXXXX

SEQ ID NO: 1168 - protein, 10 aa, Artificial Sequence
  Synthetic
  misc_feature (2)..(7): Xaa can be any naturally occurring amino acid
  misc_feature (9)..(10): Xaa can be any naturally occurring amino acid
QXXXXXXIXX

SEQ ID NO: 1169 - protein, 108 aa, Artificial Sequence
  Synthetic
  misc_feature (1)..(4): Xaa can be any naturally occurring amino acid
  misc_feature (7)..(7): Xaa can be any naturally occurring amino acid
  misc_feature (9)..(11): Xaa can be any naturally occurring amino acid
  misc_feature (13)..(13): Xaa can be any naturally occurring amino acid
  misc_feature (15)..(15): Xaa can be any naturally occurring amino acid
  misc_feature (17)..(21): Xaa can be any naturally occurring amino acid
  misc_feature (24)..(34): Xaa can be any naturally occurring amino acid
  misc_feature (42)..(43): Xaa can be any naturally occurring amino acid
  misc_feature (45)..(45): Xaa can be any naturally occurring amino acid
  misc_feature (47)..(47): Xaa can be any naturally occurring amino acid
  misc_feature (50)..(56): Xaa can be any naturally occurring amino acid
  misc_feature (58)..(58): Xaa can be any naturally occurring amino acid
  misc_feature (60)..(60): Xaa can be any naturally occurring amino acid
  misc_feature (66)..(66): Xaa can be any naturally occurring amino acid
  misc_feature (69)..(71): Xaa can be any naturally occurring amino acid
  misc_feature (77)..(81): Xaa can be any naturally occurring amino acid
  misc_feature (83)..(83): Xaa can be any naturally occurring amino acid
  misc_feature (85)..(85): Xaa can be any naturally occurring amino acid
  misc_feature (90)..(95): Xaa can be any naturally occurring amino acid
  misc_feature (97)..(98): Xaa can be any naturally occurring amino acid
  misc_feature (101)..(101): Xaa can be any naturally occurring amino acid
  misc_feature (105)..(108): Xaa can be any naturally occurring amino acid
XXXXTQXPXXXSXSXGXXXXXCRXXXXXXXXXXXWYQQKPGXXPXLXIYXXXXXXXGXPXRFSGSXSGXXXTLTISXXXXXDXAXYYCQXXXXXXIXXFGXGTKXXXX

SEQ ID NO: 1170 - protein, 829 aa, Homo sapiens
MGLPRGPLASLLLLQVCWLQCAASEPCRAVFREAEVTLEAGGAEQEPGQALGKVFMGCPGQEPALFSTDNDDFTVRNGETVQERRSLKERNPLKIFPSKRILRRHKRDWVVAPISVPENGKGPFPQRLNQLKSNKDRDTKIFYSITGPGADSPPEGVFAVEKETGWLLLNKPLDREEIAKYELFGHAVSENGASVEDPMNISIIVTDQNDHKPKFTQDTFRGSVLEGVLPGTSVMQVTATDEDDAIYTYNGVVAYSIHSQEPKDPHDLMFTIHRSTGTISVISSGLDREKVPEYTLTIQATDMDGDGSTTTAVAVVEILDANDNAPMFDPQKYEAHVPENAVGHEVQRLTVTDLDAPNSPAWRATYLIMGGDDGDHFTITTHPESNQGILTTRKGLDFEAKNQHTLYVEVTNEAPFVLKLPTSTATIVVHVEDVNEAPVFVPPSKVVEVQEGIPTGEPVCVYTAEDPDKENQKISYRILRDPAGWLAMDPDSGQVTAVGTLDREDEQFVRNNIYEVMVLAMDNGSPPTTGTGTLLLTLIDVNDHGPVPEPRQITICNQSPVRQVLNITDKDLSPHTSPFQAQLTDDSDIYWTAEVNEEGDTVVLSLKKFLKQDTYDVHLSLSDHGNKEQLTVIRATVCDCHGHVETCPGPWKGGFILPVLGAVLALLFLLLVLLLLVRKKRKIKEPLLLPEDDTRDNVFYYGEEGGGEEDQDYDITQLHRGLEARPEVVLRNDVAPTIIPTPMYRPRPANPDEIGNFIIENLKAANTDPTAPPYDTLLVFDYEGSGSDAASLSSLTSSASDQDQDYDYLNEWGSRFKKLADMYGGGEDD

SEQ ID NO: 1171 - protein, 38 aa, Homo sapiens
VAYSIHSQEPKDPHDLMFTIHRSTGTISVISSGLDREK

SEQ ID NO: 1172 - protein, 37 aa, Homo sapiens
VPEYTLTIQATDMDGDGSTTTAVAVVEILDANDNAPM

SEQ ID NO: 1173 - protein, 36 aa, Homo sapiens
FDPQKYEAHVPENAVGHEVQRLTVTDLDAPNSPAWR

SEQ ID NO: 1174 - protein, 36 aa, Homo sapiens
YRILRDPAGWLAMDPDSGQVTAVGTLDREDEQFVRN

SEQ ID NO: 1175 - protein, 51 aa, Artificial Sequence
  Synthetic
EVEKTACPSGKKAREIDESLIFYKKWELEACVDAALLATQMDRVNAIPFTY

SEQ ID NO: 1176 - protein, 38 aa, Artificial Sequence
  Synthetic
EQLDVLKHKLDELYPQGYPESVIQHLGYLFLKMSPEDI

SEQ ID NO: 1177 - protein, 69 aa, Artificial Sequence
  Synthetic
RKWNVTSLETLKALLEVNKGHEMSPQVATLIDRFVKGRGQLDKDTLDTLTAFYPGYLCSLSPEELSSVP

SEQ ID NO: 1178 - protein, 48 aa, Artificial Sequence
  Synthetic
PSSIWAVRPQDLDTCDPRQLDVLYPKARLAFQNMNGSEYFVKIQSFLG

SEQ ID NO: 1179 - protein, 44 aa, Artificial Sequence
  Synthetic
GAPTEDLKALSQQNVSMDLATFMKLRTDAVLPLTVAEVQKLLGP

SEQ ID NO: 1180 - protein, 622 aa, Artificial Sequence
  Synthetic
MALPTARPLLGSCGTPALGSLLFLLFSLGWVQPSRTLAGETGQEAAPLDGVLANPPNISSLSPRQLLGFPCAEVSGLSTERVRELAVALAQKNVKLSTEQLRCLAHRLSEPPEDLDALPLDLLLFLNPDAFSGPQACTRFFSRITKANVDLLPRGAPERQRLLPAALACWGVRGSLLSEADVRALGGLACDLPGRFVAESAEVLLPRLVSCPGPLDQDQQEAARAALQGGGPPYGPPSTWSVSTMDALRGLLPVLGQPIIRSIPQGIVAAWRQRSSRDPSWRQPERTILRPRFRREVEKTACPSGKKAREIDESLIFYKKWELEACVDAALLATQMDRVNAIPFTYEQLDVLKHKLDELYPQGYPESVIQHLGYLFLKMSPEDIRKWNVTSLETLKALLEVNKGHEMSPQVATLIDRFVKGRGQLDKDTLDTLTAFYPGYLCSLSPEELSSVPPSSIWAVRPQDLDTCDPRQLDVLYPKARLAFQNMNGSEYFVKIQSFLGGAPTEDLKALSQQNVSMDLATFMKLRTDAVLPLTVAEVQKLLGPHVEGLKAEERHRPVRDWILRQRQDDLDTLGLGLQGGIPNGYLVLDLSMQEALSGTPCLLGPGPVLTVLALLLASTLA

SEQ ID NO: 1181 - protein, 630 aa, Artificial Sequence
  Synthetic
MALPTARPLLGSCGTPALGSLLFLLFSLGWVQPSRTLAGETGQEAAPLDGVLANPPNISSLSPRQLLGFPCAEVSGLSTERVRELAVALAQKNVKLSTEQLRCLAHRLSEPPEDLDALPLDLLLFLNPDAFSGPQACTRFFSRITKANVDLLPRGAPERQRLLPAALACWGVRGSLLSEADVRALGGLACDLPGRFVAESAEVLLPRLVSCPGPLDQDQQEAARAALQGGGPPYGPPSTWSVSTMDALRGLLPVLGQPIIRSIPQGIVAAWRQRSSRDPSWRQPERTILRPRFRREVEKTACPSGKKAREIDESLIFYKKWELEACVDAALLATQMDRVNAIPFTYEQLDVLKHKLDELYPQGYPESVIQHLGYLFLKMSPEDIRKWNVTSLETLKALLEVNKGHEMSPQAPRRPLPQVATLIDRFVKGRGQLDKDTLDTLTAFYPGYLCSLSPEELSSVPPSSIWAVRPQDLDTCDPRQLDVLYPKARLAFQNMNGSEYFVKIQSFLGGAPTEDLKALSQQNVSMDLATFMKLRTDAVLPLTVAEVQKLLGPHVEGLKAEERHRPVRDWILRQRQDDLDTLGLGLQGGIPNGYLVLDLSMQEALSGTPCLLGPGPVLTVLALLLASTLA

SEQ ID NO: 1182 - protein, 622 aa, Artificial Sequence [sequence omitted]

SEQ ID NO: 1183 - protein, 982 aa, Artificial Sequence; identical to SEQ ID NO: 417
  Synthetic
